(19) United States
(12) Patent Application Publication
(10) Pub. No.: US 2024/0293478 A1
(43) Pub. Date: Sep. 5, 2024

(54) IMMUNOSTIMULATORY BACTERIA FOR CONVERTING MACROPHAGES INTO A PHENOTYPE AMENABLE TO TREATMENT, AND COMPANION DIAGNOSTIC FOR IDENTIFYING SUBJECTS FOR TREATMENT

(71) Applicant: Actym Therapeutics, Inc., Berkeley, CA (US)

(72) Inventors: Akshata Udyavar, San Ramon, CA (US); Laura Hix Glickman, Oakland, CA (US); Chingnam Cheung, Oakland, CA (US); Alexandre Charles Michel Iannello, Oakland, CA (US); Bret Nicholas Peterson, Oakland, CA (US); Nicholas Boyce Woodall, Waltham, MA (US); Christopher D. Thanos, Tiburon, CA (US)

(21) Appl. No.: 18/660,096

(22) Filed: May 9, 2024

Related U.S. Application Data
(63) Continuation of application No. PCT/US22/79502, filed on Nov. 8, 2022.
(60) Provisional application No. 63/277,601, filed on Nov. 9, 2021.
(60) Provisional application No. 63/278,076, filed on Nov. 10, 2021.
(60) Provisional application No. 63/311,424, filed on Feb. 17, 2022.
(60) Provisional application No. 63/378,853, filed on Oct. 7, 2022.

(51) Int. Cl. A61K 35/74; A61P 35/00; C07K 16/28; C12N 15/85; C12Q 1/6886; G01N 33/569; G01N 33/574; G01N 33/68

(52) U.S. Cl. CPC A61K 35/74; A61P 35/00; C07K 16/2818; C12N 15/85; C12Q 1/6886; G01N 33/56972; G01N 33/57492; G01N 33/6893; C12Q 2600/106; G01N 2333/521; G01N 2333/525; G01N 2333/56; G01N 2333/565; G01N 2333/70596; G01N 2474/20

(57) ABSTRACT

Provided are methods for treating cancer by converting tumor-resident macrophages into a hybrid M1/M2 macrophage phenotype; this phenotype has attributes that are advantageous for cancer therapy. Hybrid markers include (lower than M2, higher than M1): SPP1, CD209, and CD206, and induced markers include MERTK, C1QC, IFNa, IFNb, CXCL10, 4-1BBL, and MYC. The methods include administering a therapeutic that effects the phenotypic conversion. Therapeutics, such as delivery vehicles, including immunostimulatory bacteria with genome modifications, are designed so that they do not induce or result in a sufficient TLR2, TLR4, TLR5 response to inhibit type I IFN. The therapeutics also encode a payload that encodes immunostimulatory proteins, such as a cytokine and a modified cytosolic DNA/RNA sensor that constitutively induces type I IFN, such as a modified STING protein. The combination of payload immunostimulatory proteins and properties of the therapeutic delivery vehicle, upon administration, results in macrophage with the hybrid phenotype. The therapeutics are administered to subjects identified as having tumors that comprise proliferating M2 macrophages.

### RELATED APPLICATIONS

[0001] This application is a continuation of International PCT application No. PCT/US2022/079502, filed Nov. 8, 2022, published as International PCT Publication No. WO 2023/086796, May 19, 2023, entitled “IMMUNOSTIMULATORY BACTERIA FOR CONVERTING MACROPHAGES INTO A PHENOTYPE AMENABLE TO TREATMENT, AND COMPANION DIAGNOSTIC FOR IDENTIFYING SUBJECTS FOR TREATMENT,” to Applicant Actym Therapeutics, Inc., and inventors Akshata Udyavar, Laura Hix Glickman, Chingnam Cheung, Alexandre Charles Michel Iannello, Bret Nicholas Peterson, Nicholas Boyce Woodall, and Christopher D. Thanos.

[0002] International PCT application No PCT/US2022/079502, claims priority to U.S. Provisional Application Ser. No. 63/378,853, filed Oct. 7, 2022, entitled “IMMUNOSTIMULATORY BACTERIA FOR CONVERTING MACROPHAGES INTO A PHENOTYPE AMENABLE TO TREATMENT AND COMPANION DIAGNOSTIC,” to Applicant Actym Therapeutics, Inc., and inventors Christopher D. Thanos, Laura Hix Glickman, Chingnam Cheung, Alexandre Charles Michel Iannello, Bret Nicholas Peterson, Nicholas Boyce Woodall, and Akshata Udyavar; to U.S. Provisional Application Ser. No. 63/311,424, filed Feb. 17, 2022, entitled “IMMUNOSTIMULATORY BACTERIA FOR CONVERTING MACROPHAGES INTO A PHENOTYPE AMENABLE TO TREATMENT AND COMPANION DIAGNOSTIC,” to Applicant Actym Therapeutics, Inc., and inventors Christopher D. Thanos, Laura Hix Glickman, Chingnam Cheung, Alexandre Charles Michel Iannello, Bret Nicholas Peterson and Nicholas Boyce Woodall; and to each of U.S. Provisional Application Ser. Nos. 63/277,601 and 63/278,076, filed Nov. 9, 2021, and Nov. 10, 2021, respectively, each entitled “IMMUNOSTIMULATORY BACTERIA-BASED VACCINES, THERAPEUTICS, AND RNA DELIVERY PLATFORMS,” each to Applicant Actym Therapeutics, Inc., and inventors Laura Hix Glickman, Chingnam Cheung, Alexandre Charles Michel Iannello, Bret Nicholas Peterson and Christopher D. Thanos.

[0003] Benefit of priority in this application, thus, is claimed to each of U.S. provisional application Ser. Nos. 63/378,853, 63/311,424, 63/278,076, and 63/277,601.

[0004] This application is related to International PCT Application No. PCT/US2021/045832, filed Aug. 12, 2021, and published as WO 2022/036159 on Feb. 17, 2022, entitled “IMMUNOSTIMULATORY BACTERIA-BASED VACCINES, THERAPEUTICS AND RNA DELIVERY PLATFORMS,” to Applicant Actym Therapeutics, Inc., and inventors Laura Hix Glickman, Bret Nicholas Peterson, Haixing Kehoe, Alexandre Charles Michel Iannello, and Christopher D. Thanos.

[0005] This application is related to U.S. Provisional Application Ser. No. 63/064,869, filed on Aug. 12, 2020, entitled “IMMUNOSTIMULATORY BACTERIA DELIVERY PLATFORM,” to Applicant Actym Therapeutics, Inc., and inventors Laura Hix Glickman, Christopher D. Thanos, Alexandre Charles Michel Iannello, Chris Rae, and Haixing Kehoe.

[0006] This application is related to U.S. Provisional Application Ser. No. 63/188,443, filed May 13, 2021, entitled “IMMUNOSTIMULATORY BACTERIA DELIVERY PLATFORM,” to Applicant Actym Therapeutics, Inc., and inventors Laura Hix Glickman, Christopher D. Thanos, Alexandre Charles Michel Iannello, Chris Rae, and Haixing Kehoe.

[0007] This application also is related to U.S. application Ser. No. 17/320,200, filed May 13, 2021, entitled “IMMUNOSTIMULATORY BACTERIA DELIVERY PLATFORMS AND THEIR USE FOR DELIVERY OF THERAPEUTIC PRODUCTS,” to Applicant Actym Therapeutics, Inc., and inventors Laura Hix Glickman, Christopher D. Thanos, Alexandre Charles Michel Iannello, Chris Rae, Haixing Kehoe, Bret Nicholas Peterson, and Chingnam Cheung.

[0008] This application is related to International Patent Application No. PCT/US2020/060307, filed on Nov. 12, 2020, and published as WO 2021/097144 on May 20, 2021, entitled “IMMUNOSTIMULATORY BACTERIA DELIVERY PLATFORMS AND THEIR USE FOR DELIVERY OF THERAPEUTIC PRODUCTS,” to Applicant Actym Therapeutics, Inc., and inventors Christopher D. Thanos, Laura Hix Glickman, Alexandre Charles Michel Iannello, Chris Rae, Haixing Kehoe, Bret Nicholas Peterson, and Chingnam Cheung.

[0009] This application is related to International Patent Application No. PCT/US2020/020240, filed on Feb. 27, 2020, and published as WO 2020/176809 on Sep. 3, 2020, and to co-pending U.S. patent application Ser. No. 16/824,500, filed on Mar. 19, 2020, and published as U.S. Publication No. US 2020/0270613 A1 on Aug. 27, 2020, each entitled “IMMUNOSTIMULATORY BACTERIA ENGINEERED TO COLONIZE TUMORS, TUMOR-RESIDENT IMMUNE CELLS, AND THE TUMOR MICROENVIRONMENT,” to Applicant Actym Therapeutics, Inc., and inventors Christopher D. Thanos, Laura Hix Glickman, Justin Skoble, Alexandre Charles Michel Iannello, and Haixing Kehoe.

[0010] This application also is related to International Patent Application No. PCT/US2018/041713, filed on Jul. 11, 2018, and published as WO 2019/014398 on Jan. 17, 2019, and to U.S. patent application Ser. No. 16/033,187, issued on Nov. 9, 2021, as U.S. Pat. No. 11,168,326, filed on Jul. 11, 2018, and published as U.S. Publication No. 2019/0017050 A1 on Jan. 17, 2019, each entitled “ENGINEERED IMMUNOSTIMULATORY BACTERIAL STRAINS AND USES THEREOF,” and each to Actym Therapeutics, Inc., and inventors Christopher D. Thanos, Laura Hix Glickman, and Justin Skoble.

[0011] This application also is related to International Patent Application No. PCT/US2019/041489, filed on Jul. 11, 2019, and published as WO 2020/014543, on Jan. 16, 2020, entitled “ENGINEERED IMMUNOSTIMULATORY BACTERIAL STRAINS AND USES THEREOF,” to Actym Therapeutics, Inc., and inventors Christopher D. Thanos, Laura Hix Glickman, Justin Skoble, and Alexandre Charles Michel Iannello.

[0012] The immunostimulatory bacteria and methods provided in each of these applications can be modified and used as described in this application, and such bacteria are incorporated by reference herein. Where permitted, the subject matter of each of these applications is incorporated by reference in its entirety.

### INCORPORATION BY REFERENCE OF SEQUENCE LISTING PROVIDED ELECTRONICALLY

[0013] An electronic version of the Sequence Listing is filed herewith, the contents of which are incorporated by reference in their entirety. The electronic file was created on May 8, 2024, is 2,190,718 bytes in size, and is titled 1710SEQ001.xml.

### FIELD OF THE INVENTION

[0014] Provided are attenuated immunostimulatory bacteria with genomes that are modified to, for example, reduce undesirable inflammatory responses and toxicity, and improve the anti-tumor activity and/or immunostimulatory activity by increasing resistance to complement inactivation, by reducing immune cell death, by promoting adaptive immunity, and by enhancing T-cell function. The increase in colonization of phagocytic cells, for anti-cancer uses improves the delivery of encoded therapeutic products to the tumor microenvironment and to tumors, and permits, among other routes, systemic administration of the immunostimulatory bacteria.

[0015] Immunostimulatory bacteria provided herein bacterioinfect proliferating macrophages, which upon expression of their encoded payload, result in a heretofore undescribed M1/M2 hybrid phenotype.

### BACKGROUND

[0016] The field of cancer immunotherapy has made great strides, as evidenced by the clinical successes of anti-CTLA-4, anti-PD-1 and anti-PD-L1 immune checkpoint antibodies (see, e.g., Buchbinder et al. (2015) J. Clin. Invest. 125:3377-3383; Hodi et al. (2010) N. Engl. J. Med. 363(8):711-723; and Chen et al. (2015) J Clin. Invest. 125:3384-3391). Tumors have evolved a profoundly immunosuppressive environment. They initiate multiple mechanisms to evade immune surveillance, reprogram anti-tumor immune cells to suppress immunity, and continually mutate resistance to the latest cancer therapies (see, e.g., Mahoney et al. (2015) Nat. Rev. Drug Discov. 14(8):561-584). Designing immunotherapies and cancer therapies that overcome immune tolerance and escape, while limiting the autoimmune-related toxicities of current immunotherapies, challenges the field of immuno-oncology. Hence, additional and innovative immunotherapies and other therapies are needed.

### SUMMARY

[0017] Immunostimulatory bacteria include other gram-negative Enterobacteriaceae, and gram-positive bacteria, such as Listeria and Shigella species. As described herein bacteria can accumulate in immunoprivileged and/or immunosuppressed cells and tissues, and hence have been used for delivery of active molecules, such as therapeutic molecules, to such cells and tissues, which include tumors, and the tumor microenvironment, and immune cells, such as phagocytic cells, including macrophages. As described herein, genome modifications can improve such properties of bacteria. For example, the bacteria can be modified so that they do not infect epithelial cells, but retain or have increased infection or uptake by phagocytic cells, such as macrophages. It also is shown herein, that for delivery of active molecules, such as proteins and nucleic acids, it is advantageous if the macrophages are proliferating, particularly for expression of nucleic acids, which requires entry across the nuclear membrane for transcription in the nuclei. The active molecules can be encoded on plasmids under control of transcription and/or translation regulatory sequences for expression. The encoding nucleic acid can be under control of prokaryotic regulatory sequences for expression in the bacteria for delivery of proteins; or can be under the control of bacterial promoters for transcription, but can be encoded in nucleic acid such that the transcripts are not translated in the bacterial hosts so that RNA is delivered to the cells and tissues; or the encoding nucleic acids can be under control of eukaryotic regulatory sequences, such as eukaryotic promoters, so that plasmids are delivered to the cells and tissues. As result, the immunostimulatory bacteria herein have a variety of applications, including, but not limited to, anti-tumor therapeutics, vaccines, including anti-cancer vaccines, and vaccines against infective agents, for RNA delivery, for protein delivery, and other applications apparent from the description and examples herein.

### Immunostimulatory Bacteria and Proliferating Macrophages

[0018] Tumors have evolved a profoundly immunosuppressive environment. They initiate multiple mechanisms to evade immune surveillance, reprogram anti-tumor immune cells to suppress immunity, and continually mutate resistance to the latest cancer therapies (see, e.g., Mahoney et al. (2015) Nat. Rev. Drug Discov. 14(8):561-584). Across the solid tumor spectrum only inflamed tumors, rich in exhausted T-cells, respond well to checkpoint immunotherapies (such as non-small cell lung cancer (NSCLC) and melanoma). Tumors that have T-cells that are excluded to the tumor stroma (T-cell excluded), and tumors without T-cells (immune desert), do not respond to existing immunotherapies, and, thus, pose an unmet therapeutic need across solid tumors. Immunotherapy effectiveness, such as immune checkpoint inhibitor-mediated antitumor responses, depend on the infiltration of T cells capable of recognizing and killing tumor cells. These immunotherapies are not effective in so-called “cold tumors,” or immune desert or T-cell excluded tumors, which are characterized by the lack of T-cell infiltration. The tumor core of T-cell excluded and of immune desert tumors is rich in myeloid cells. T-cell excluded tumors have an abundance of tumor-associated macrophages (TAMs) that are immunosuppressive and form a barrier that keeps the T-cells out (Keren et al. (2018) Cell 174:1373-1387; Bindea et al. (2013) Immunity 39:782-795).

[0019] Successful attenuated viral vaccines, including vaccinia viruses, such as Modified Vaccinia Ankara virus (MVA) for smallpox, and the oral poliovirus vaccine (Sabin), are capable of inducing proper T-cell mediated anti-viral immune responses. These vaccines start by targeting epithelial or fibroblast cells and induce apoptosis, rather than the lytic cell death characteristic of the virulent wild-type strains. These apoptotic cells then recruit monocyte-derived and tissue-resident macrophages through chemoattractant factors such as caspase-dependent secretion of ATP (Elliott et al. (2009) Nature 461:282-286). Virally-infected apoptotic cells then are phagocytosed by macrophages, which sense the presence of viral cytosolic DNA or RNA and induce type I interferon (IFN), which produces an antiviral signaling cascade that recruits and activates CD8⁺ T-cell priming (Royo et al. (2014) J Virol. 88:5511-5523). Virally-infected macrophages then migrate to the lymph node, where they prime CD4⁺ helper T-cells, to promote germinal center B-cell antibody production, and CD8⁺ T-cells, which then traffic to the infected tissue and remain as long-lived tissue-resident memory CD8⁺ T-cells. These immune cells are critical for recognizing early infection of tissue-resident cells and eliminating them via FasL-induced (Fas ligand or CD95L or CD178, a type-II transmembrane protein in the TNF family) apoptosis, often before the virus is detected by the immune system (Hobbs et al. (2018) Curr. Opin. Virol. 28:12-19; El-Jesr et al. (2020) Front. Immunol. doi.org/10.3389/immun.2020.568412; Wahid et al. (2005) J Virol. 79:401-409).

[0020] Macrophages are the primary immune cells that induce interferon-beta (IFNβ) and CD8⁺ T-cell activation; whereas dendritic cells primarily produce IFNα and activate CD4⁺ T-cells (Corrales et al. (2015) Cell Reports 11:1018-1030; Wahid et al. (2005) J Virol 79:401-409). The intersection of apoptotic cells, macrophage phagocytosis, and induction of type I IFN to prime CD8⁺ T-cells is a hallmark of the ability of a vaccine to generate life-long humoral and cellular immunity. Similarly, defects in cytosolic nucleases (e.g., DNaseII, TREX1) can allow leaked or phagocytosed nuclear DNA to trigger cytosolic DNA sensing via cyclic-GA-Synthase (cGAS), which produces a cyclic dinucleotide (cGAMP) that activates Stimulator of IFN Genes (STING). This results in type I IFN production and CD8⁺ T-cell priming of either self-antigens to induce autoimmunity, or tumor antigens to induce anti-tumor immunity (Barber et al. (2015) Nat. Rev. Immunol. 15:760-770; Ahn et al. (2018) Cancer Cell 33:862-873).

[0021] Designing cancer immunotherapies that convert the immunosuppressive tumor-associated macrophages (TAMs) to Type I IFN-producing macrophages, capable of in situ priming of CD8⁺ T-cells to tumor antigens and inducing durable anti-tumor immunity, are needed to address T-cell excluded and immune desert tumors. Immunostimulatory bacteria provided herein address this need. The immunostimulatory bacteria provided herein, as described herein, are genome-modified to remove undesirable bacterial sensing from Toll-like receptor-2 (TLR2), TLR4, and/or TLR5. As described herein, sensing from these TLRs, particularly TLR2, as well TLR4 and TLR5, directly suppress the ability of a macrophage to produce type I IFN and induce pro-inflammatory cytokines which impair CD8⁺ T-cell priming. The immunostimulatory bacterium also are modified to include a purine auxotrophy, which provides tumor targeting following systemic, such as IV, dosing. The immunostimulatory bacterium also are genome-modified, such as by modifications resulting in the elimination of flagella, to be taken up only by phagocytic tumor-resident myeloid cells, including macrophages. Among the immunostimulatory bacteria described and provided herein include those that, by virtue of genome modifications, infect phagocytic cells, generally at least to the same extent or in increased amounts compared to the bacteria without the modifications. Included are bacteria that do not infect epithelial cells and/or endothelial cells. The macrophages then destroy these attenuated bacteria, providing plasmid transfer and expression of the payloads as described herein. Of particular interest are combination encoded payloads, such as the combination of a cytokine, such as IL-15, particularly in the engineered IL-15/IL-15R alpha chain complex (human IL-15 cytokine fused with the IL-15 receptor alpha chain (IL-15Rα-IL-15sc), and variants of cytosolic DNA/RNA sensors to render them constitutive, such as STING (eSTING) proteins provided herein that are constitutively active, and, also can be modified or selected to limit the production of immunosuppressive NF-kB signaling in favor of antiviral type I IFN signaling. Exemplary of the cytosolic DNA/RNA sensors is the chimeric STING that includes a gain-of-function mutation(s) and a CTT from a STING protein with lower NF-κB signaling activity, such as the eSTING (engineered STING) designated huSTING tazCTT N154S/R284G. As shown herein, the combination of expression of such cytokines and cytosolic DNA/RNA sensors, such as eSTING, in the tumor microenvironment and in the macrophages overcomes the immunosuppressive tumor microenvironment in T-cell desert/depleted tumors. As demonstrated in the examples, immunostimulatory bacteria provided colonize the tumor microenvironment and deliver payloads to phagocytic APCs, inducing a durable anti-tumor response. This was observed after a single intravenous dose. For example, an exemplified strain YS1646Δasd/ΔFLG/ΔpagP/ΔansB/ΔcsgD containing a plasmid encoding huIL-15Rα-IL-15sc+huSTING N154S/R284G tazCTT, leads to IL-15 secretion and IFN-beta expression, respectively, in cell lines and primary M2 macrophages. The bacterium is selectively internalized by phagocytic APCs in vitro, and tumor-resident APCs in vivo. Primary M2 macrophages polarized toward a co-stimulatory and phagocytic hybrid M1/M2 phenotype. The bacterium induces immune reprogramming and remodeling of the tumor microenvironment through myeloid and CD8+ T-cell infiltration and activation. Additionally, as exemplified synergistic anti-tumor activity was observed in vivo with combination therapy with immunotherapy, such as anti-PD-1 antibody.

[0022] Among the immunostimulatory bacteria provided herein are those that target tumor-resident tumor-associated macrophages (TAMs) following systemic, such as IV, administration. Their activity is primarily limited to or is limited to phagocytic and proliferating TAMs, in which they transfer DNA plasmids to the nucleus of a dividing cell, where encoded payloads are expressed. Of interest herein, are the payload combinations, such as combinations of a cytokine, such as an IL-15, particularly IL-15/IL-15R alpha chain complex, and a STING protein, particularly one that has constitutive activity, and also can have lower NF-κB signaling activity compared to wild-type human STING, such as a wild-type human STING of any of SEQ ID NOs. 305-309, which set forth the sequences of allelic variants of human STING proteins with substantially the same activities and properties. Also of interest are immunostimulatory bacteria that encode a type I interferon as a single payload or in combination with one or more other immunostimulatory protein(s), such as the IL-15/IL-15R alpha chain complex and/or a modified STING, such as a constitutive STING, as described herein.

[0023] It is shown herein that the production of the combined payload, such as huIL-15Rα-IL-15sc and the chimeric STING, such as huSTING N154S/R284G tazCTT, by the immunostimulatory bacteria, and other alternative immunostimulatory payloads induces a hybrid macrophage phenotype that is particularly advantageous for anti-tumor therapy. The hybrid macrophage phenotype possesses the immunostimulatory and anti-tumor properties of an M1 or M1-like macrophage, while retaining the phagocytic properties of an M2 or M2-like tumor-associated macrophage (TAM). Infected macrophages, as described herein, also have and can be identified by a hybrid SPP1⁺ and C1QC⁺ (expression of both SPP1 and C1QC) macrophage phenotype, with enhanced phagocytic and proliferating properties. The result is a hybrid macrophage phenotype that can phagocytose apoptotic tumor cells, induce constitutive type I IFN to recruit and prime tumor antigen-specific CD8⁺ T-cells, and induce durable anti-tumor immunity.

[0024] Uptake of the immunostimulatory bacteria modified as described herein to lack flagella and to have modified LPS, as well as other modifications is specific to phagocytic cells, particularly human M2 macrophages. These bacteria comprise genome modifications that remove inflammatory surface components, including flagella, curli fimbriae, and inflammatory LPS. They also include adenosine auxotrophy providing obligatory dependence on nutrients, such as adenosine, ATP, AMP, and purines, that accumulate in the TME, and that are immunosuppressive.

[0025] For embodiments in which the encoded payloads are expressed by the eukaryotic host cell transcriptional machinery, expression of the payloads occurs in proliferating macrophage; the plasmids can enter the nucleus in proliferating macrophages. It also is shown and described herein, that the immunostimulatory bacteria provided herein are internalized by M2 macrophages, but not by HUVECs; whereas VNP20009 is internalized by HUVECs and M2 macrophage, indicating that the immunostimulatory bacteria provided herein that lack flagella and have penta-acylated LPS are more specific, and better colonize tissues of interest for anti-tumor treatment, and also as vaccines per se. The bacteria are internalized and trafficked to acidic lysosomes and nuclei in human macrophages.

[0026] It is shown herein bacteria and therapeutics described and/or provided herein induce a hybrid M1/M2 phenotype; the resulting hybrid M1/M2 phenotype induces anti-tumor immunity. The M1/M2 phenotype can be identified by markers, indicative of M1 and/or M2 phenotypes, that are upregulated and/or downregulated following treatment. Markers detailed herein, include co-stimulation markers, such as CD80, CD86, and phagocytic markers, such as CD206. Thus, a therapeutic that can deliver a non-integrating (non-integrating into the genome) therapeutic payload to a macrophage and convert or produce or result in macrophage with this phenotype is capable of inducing durable anti-tumor immunity. Durable anti-tumor immunity is evidenced by dose-dependent anti-tumor response upon tumor rechallenge results. The therapeutics, including the immunostimulatory bacteria reverse the immunosuppressive tumor microenvironment. The bacteria also are shown herein to convert immunotherapy, such as anti-PD-1, refractive tumors to responsive tumors. For example, synergistic activity with anti-PD-1 was observed.

[0027] It is shown herein, that the presence of proliferating macrophage in a tumor can be prognostic of the effectiveness a therapy that delivers a non-integrating nucleic acid payload. Introduced DNA, such as from the immunostimulatory bacteria, can be transcribed and translated in proliferating macrophage. Proliferating macrophages in a tumor can be identified from a biopsy by prospective biomarkers. Proliferating macrophage can be identified by some or all the following markers:
[0028] Tumor gene expression of G2M module (>14 genes of the set), Stathmin1 (STMN1);
[0029] Biopsy surface markers: CD68+KI67 and/or PCNA, MERTK;
[0030] SPP1 in some tumor types: lung, gastric; and/or
[0031] C1QC in some tumor types: colon and breast.

[0032] Provided herein are methods for identifying proliferating macrophages in human tumors, and for identifying subjects, who will be responsive to treatment with immunostimulatory bacteria, particularly those with a payload that comprises a cytokine and STING is described. Also provided are methods to therapeutically induce an optimal tumor macrophage phenotype prior to treatment by administering a therapy that induces apoptosis.

### Immunostimulatory Bacteria, Therapeutics, and Methods

[0033] Provided are methods of treating a cancer or tumor administering a therapeutic that, upon administration, results in tumor macrophages that have a hybrid M1/M2 phenotype. The macrophages that that undergo this phenotype change are proliferating macrophages. The therapeutics include any designed or prepared to achieve this phenotypic change. It is shown herein that in embodiments in which the delivery vehicle, such as the immunostimulatory bacteria, encodes an immunostimulatory protein, the nucleic acid must get into the nucleus for transcription. This occurs in proliferating macrophage, such as the immunostimulatory bacteria. The encoded payload, such as combination of immunostimulatory proteins, such as a protein that is part of a cytosolic DNA/RNA sensor pathway that leads to expression of type I interferon (IFN), and also a cytokine, such as, for example, IL-15/IL-15R alpha chain complex, result in the phenotypic change of the macrophage. Proteins that are part of a DNA/RNA sensor pathway include, for example, STING, MDA5, IRF-3, IRF-7, IRF-5, IRF8, and RIG-I, particularly modified forms thereof that result in constitutive expression of type I interferon (IFN). The delivery vehicles also can deliver or encode agonists of these proteins, such as an agonist of one or more of STING, MDA5, IRF-3, IRF-5, IRF-7, IRF-8, and/or RIG-I, to result in type I interferon (IFN) expression.

[0034] Also provided are isolated macrophages that have been treated by introducing a therapeutic, such as immunostimulatory bacteria provided herein, that convert the macrophage to an M1/M2 phenotype. Such macrophages can phagocytose apoptotic tumor cells, induce constitutive type I IFN to recruit and prime tumor antigen-specific CD8+ T-cells, and induce durable anti-tumor immunity. Macrophage or immune cells comprising macrophage can be isolated from a subject or they can be, where appropriate, allogeneic, particularly a subject with a tumor or tumors that are immune desert tumors or T-cell excluded tumors, which include suppressive myeloid cells, and for which therapies, such as immunotherapy are ineffective, or a subject treated with but not responding to treatment with immunotherapy, such as a checkpoint inhibitor. The macrophage or cells comprising macrophage can be treated with, such as infected with the therapeutic, such as the immunostimulatory bacteria in vitro, cultured as needed or stored, and then introduced, as in a cell therapy protocol, into a subject to thereby provide macrophage that have anti-tumor activity. The macrophages or cells comprising macrophages that have been treated in vitro to render macrophages M1/M2 hybrids can be administered systemically or intratumorally, or intraperitoneally, or by other suitable route, to result in an anti-tumor response in the subject. Any of the immunostimulatory bacteria provided herein, that effect this phenotypic conversion, and delivery vehicles, and other therapeutics can be introduced in the cells comprising macrophages. These macrophage can reprogram the tumor microenvironment to result in anti-tumor immunity, including myeloid repolarization. Provided are compositions and cell cultures that comprise macrophage with an M1/M2 phenotype, including compositions formulated for cell therapy. The compositions contain macrophage that, for example, have be infected in vitro with any of the bacteria provided herein that induce a type I interferon (IFN), such as, for example, the bacteria encoding DNA/RNA sensor proteins and/or cytokines, and bacteria that encode a type I interferon (IFN) or a plurality of such interferons.

[0035] Exemplary of the therapeutics are the immunostimulatory bacteria described and provided herein. It also is shown herein that the cancers and/or tumors susceptible to treatment with the immunostimulatory bacteria provided herein include those that have one or more of elevated adenosine, TGFbeta, relative to non-tumor tissue, and/or the tumor is hypoxic. Exemplary of such cancers is chronic lymphocytic leukemia (CLL) or a myeloid malignancy. The immunostimulatory bacteria as shown and described herein, colonize solid tumors.

[0036] Provided and described herein are immunostimulatory bacteria that are cancer therapeutics by virtue of their ability to effectively colonize tumors, particularly tumor resident immune cells, and by virtue of the encoded payloads that result in an anti-tumor immune response. As described below, these bacteria, when administered, infect or are taken up by phagocytic cells, such as macrophages in the tumors. As described herein, bacteria and therapeutics described and provided herein can convert the phenotype of the macrophages to an M1/M2 hybrid phenotype. Because of their ability to colonize tumors and the tumor microenvironment, immunostimulatory bacteria provided herein can be used to treat immune desert (immune-excluded or T-cell excluded or cold) tumors, which have scarce or absent T-cell infiltration in the tumor microenvironment and tumors. These include tumors with stromal barriers. The immunostimulatory bacteria provided herein can turn so-called “cold” tumors, which are resistant to or non-responsive to immunotherapy, into “hot” tumors.

[0037] The immunostimulatory bacteria include genome modifications described herein, such that they are TLR2/4/5 attenuated, such as by virtue of elimination of flagella, the msbB⁻/pagP⁻ phenotype, as well as additional mutations, such as the elimination of curli fimbriae, and also other mutations, such as the ansB⁻ phenotype, described herein. These bacteria can proliferate in vivo. The payloads encoded in the plasmid(s) in the bacteria are those that are part of a cytosolic DNA/RNA sensor pathway that leads to expression of type I interferon (IFN). In particular, these products include one or more mutations, such as gain-of-function mutation(s), to render expression of type I IFN constitutive. These immunostimulatory bacteria also can encode a cytokine or cytokines, such as an IL-15, particularly as an IL-15/IL-15R alpha chain complex, and can encode tumor-associated antigens and/or bi-specific T-cell engager antibodies. They can also encode a type I interferon (IFN) and/or other immunostimulatory proteins. For cancer therapy, the bacteria can be administered systemically.

[0038] It is shown herein, that immunostimulatory bacteria, such as the bacteria that have genome modifications as described herein that target or accumulate in macrophage, such as the bacteria designated STACT (S. Typhimurium-Attenuated Cancer Therapy). The STACT contain particular genome modifications, such as no flagella, modified LPS, and other properties. The STACT bacteria contain a plasmid. The plasmid encodes a payload of interest, such as one or more immunostimulatory proteins, such as a cytokine and cytosolic DNA/RNA sensor, such as STING, generally modified to have constitutive activity so that, upon infection of macrophage and expression of the encoded STING, type I interferon is constitutively expressed. For example, the bacteria include a plasmid that encodes a cytokine, such as an 15/IL-15R alpha chain complex and a modified STING that constitutively induces type I IFN. These bacteria specifically target and reprogram immunosuppressive tumor-associated macrophages (TAMs) into hybrid M1/M2 phenotype phagocytic and T-cell priming macrophages.

[0039] Included are bacteria that, as described below, encode the payload(s) under control of a prokaryotic promoter. In some embodiments, the nucleic acid includes or encodes signals that prevent or do not facilitate translation in the bacteria, whereby the RNA is delivered to the tumor microenvironment and tumors and immune cells, including the macrophages, therein. In other embodiments, the RNA is transcribed by the bacterial ribosomes and proteins are delivered.

[0040] The immunostimulatory bacteria provided herein, when administered to a subject, convert immune-suppressive tumor-associated macrophages (TAMs) into tumor antigen presenting cells (APCs), capable of inducing type I interferon (IFN)-mediated recruitment and in situ priming of CD8⁺ T-cells. The immunostimulatory bacteria, when administered to a subject with cancer, effect the phenotype conversion and induce durable anti-tumor immunity in T-cell excluded and immune desert solid tumors. The immunostimulatory bacteria, such as the bacteria that are modified to target macrophages and that encode a combination of a protein that constitutively induces type I interferon expression in macrophages, and cytokine, can effect phenotypic changes. These changes can convert T-cell excluded/desert tumors into hot tumors, which are susceptible to treatment with immunotherapy, such as anti-checkpoint antibodies. The immunostimulatory bacteria provided herein that encode one or more type I interferon(s) (IFN(s)) also can be used to convert T-cell excluded and desert tumors into hot tumors that are responsive to immunotherapy, such as by therapy with immune checkpoint inhibitors.

[0041] The immunostimulatory bacteria herein have genome modifications that render them auxotrophic for purines and purine metabolites, particularly adenosine. Purines and metabolites accumulate to pathologic concentrations in tumors, and not in healthy tissue; among the purine metabolites is adenosine, which is immunosuppressive. The immunostimulatory bacteria, which accumulate in the tumor microenvironment and tumors, thus reduce the concentrations and reverse or prevent the immunosuppressive effects of accumulation of metabolites, such as adenosine.

[0042] Immunostimulatory bacterium bacteria provided herein are genome-modified to have reduced bacterial component recognition by TLR2, TLR4 and TLR5; these modifications reduce or prevent production of pro-inflammatory cytokines that suppress CD8⁺ T-cell priming, as well as TLR-mediated signaling pathways that impair macrophage induction of type I IFN. Induction of type IFN can be rendered constitutive by the expression of the bacterially-encoded modified cytosolic DNA/RNA sensors, such as STING, particularly modified STING that renders type I interferon expression constitutive in the macrophage. Following phagocytosis of administered bacteria, such as administered by intravenous administration, the bacteria are rapidly eliminated and the plasmid-encoded immunomodulatory payloads are ectopically expressed. The payload delivery is limited to immunosuppressive TAMs of the tumor microenvironment, and not to phagocytic macrophages in the liver or other tissues, due to, as shown herein, the requirement for bacterial uptake and DNA plasmid transfer to the nucleus that the macrophage are phagocytic and proliferating.

[0043] The immunostimulatory bacteria provided herein and the methods and uses herein address an unmet need for treating tumors that are macrophage-rich but lack T-cells and do not respond to existing immunotherapies. The bacteria provided herein are taken up by phagocytic cells and effect the conversion to M1/M2 hybrid phenotype. It is shown herein that proliferating macrophages can transfer the bacterial plasmid into the nucleus, and transcribe the encoded payload, which are then translated to produce immunostimulatory or immunomodulatory proteins, such as the modified STING and a cytokine. Exemplary of these bacteria are referred to as STACT. The STACT contain a plasmid-encoded human IL-15 cytokine fused with the IL-15 receptor alpha chain (IL-15plex) and an engineered constitutive STING (eSTING). The working examples herein demonstrate that such bacteria promote CD8⁺ T-cell mediated tumor clearance in T-cell excluded tumors and elicit durable anti-tumor immunity, and also have a highly favorable safety profile following IV dosing in primates. The STACT-delivered combination of IL-15plex+eSTING to immunosuppressive TAMs induces a heretofore unknown hybrid M1/M2 macrophage phenotype. Macrophages with this phenotype exhibit the immunostimulatory and T-cell priming properties of an M1-like macrophage, and retain the tumor cell phagocytic properties of an M2-like TAM. As shown herein, the infected macrophages have a hybrid SPP1⁺ C1QC⁺ phenotype, with enhanced phagocytic and proliferating properties. The resulting macrophages with this phenotype phagocytose apoptotic tumor cells, induce type I IFN, produce IL-15 to recruit, prime and maintain tumor antigen-specific CD8⁺ T-cells, and promote durable anti-tumor immunity.

[0044] As described above, in exemplary embodiments, among the immunostimulatory bacteria provided herein are those that are referred to with the acronym STACT (5. Typhimurium-Attenuated Cancer Therapy). These are exemplary of the immunostimulatory bacteria described and provided herein. The immunostimulatory bacteria, including the exemplary bacteria designated STACT, comprise genome modifications that result in advantageous properties, including, but not limited to: (1) enhanced, compared to the unmodified parental strain VNP20009 (also designated YS1456), tolerability after IV dosing, (2) tumor-specific enrichment, (3) phagocytosis by tumor-resident antigen-presenting cells (APCs) with a lack of epithelial cell infectivity, (4) multiplexed genetic cargo delivery, and (5) attenuation of bacterial pathways that impair CD8⁺ T-cell function. As a particular example of the exemplary STACT immunostimulatory bacteria are those that encode immunomodulatory molecules, including immunostimulatory proteins, such as a cytokine, such as an IL-15, such as IL-15/IL-15R alpha chain complex, and a modified STING protein that constitutively induces type I IFN. Exemplary of STACT immunostimulatory bacterium are the strains that are designated YS1646Δasd/ΔFLG/ΔpagP/ΔansB/ΔcsgD.

[0045] It is shown herein, that the presence of proliferating macrophage in a tumor can be prognostic of the effectiveness of a therapy that delivers a non-integrating nucleic acid payload. Proliferating macrophage in a tumor can be identified from a biopsy by prospective biomarkers. Proliferating macrophage can be identified by the following markers:
[0046] Tumor gene expression of G2M module (>14 genes of the set), Stathmin1 (STMN1);
[0047] Biopsy surface markers: CD68+KI67 and/or PCNA, MERTK;
[0048] SPP1 in some tumor types: lung, gastric;
[0049] C1QC in some tumor types: colon and breast.

[0050] Provided herein are methods for identifying proliferating macrophages in human tumors, and for identifying subjects, who will be responsive to treatment with immunostimulatory bacteria, such as with the bacteria encoding a payload that, when expressed, comprises a cytokine and STING is described. Also provided are methods to therapeutically induce an optimal tumor macrophage phenotype prior to treatment by administering a therapy that induces apoptosis.

[0051] Immunostimulatory bacteria encoding other combinations of encoded immunostimulatory proteins are provided. These include cytokines, type I interferon (IFN)-inducing factors, co-stimulatory receptors, checkpoint antibodies and TGFβR-Fc decoys. The engineered STING (eSTING) proteins as described herein can have constitutive type I IFN inducing activity, and also can have low NF-κB signaling activity, relative to wild-type human STING. Combinations of the eSTING and immunostimulatory protein were evaluated in primary human APCs using in vitro functional assays. Numerous combinations possessed the desired activities. Among these are the bacteria that encoded IL-15Ra-IL-15 (IL-15)+eSTING, which were evaluated in murine tumor models for therapeutic efficacy and mechanism, as well as tolerability in rodents and primates after systemic administration. Treatment with bacteria encoding the combination of modified STING (eSTING) protein and cytokine exhibited a high degree of complete tumor responses that were entirely CD8⁺ T-cell dependent. In an autochthonous breast cancer model that lacks any significant lymphocyte infiltrate, these bacteria uniformly enrich in each spontaneous lesion to high levels after IV dosing and resulted in significant CD8⁺ T-cell infiltration. In primates, these bacteria were well-tolerated, rapidly cleared, and elicited minimal cytokine response after IV dosing. Thus, the bacteria, so-engineered, deliver a payload of the combination of a cytokine, such as an IL-15 (IL-15/IL-15R alpha chain complex), and eSTING to phagocytic APCs in the solid tumor microenvironment after systemic administration. The bacteria promote CD8⁺ T-cell mediated tumor clearance in T-cell excluded tumors, elicit durable anti-tumor immunity, and are well-tolerated in primates.

[0052] Tumors that are particularly susceptible to treatment are shown herein that are enriched in adenosine (AD) or ADO pathway metabolites (ATP, AMP, Adenine, guanine, and adenosine) myeloid signatures. These include for example tumors that have one or more of elevated adenosine and TGFbeta, relative to a non-tumor tissue, and/or hypoxic tumors or cancers. These include lymphocytic leukemia and myeloid malignancies. They also include tumors that have these signatures, including renal clear cell carcinoma, mesothelioma, breast, pancreatic, NSCLC adenocarcinoma, sarcoma, ovarian, cervical, endocervical, head and neck squamous, esophageal adenocarcinomas, stomach carcinoma, NSCLC squamous tumors, and some thyroid tumors. These tumors can be treated with the therapeutics provided herein to render them hot tumors.

[0053] Provided are immunostimulatory bacteria that contain genome modifications and a plasmid that encodes one or more therapeutic products, such as anti-cancer therapeutics or associated treatments. The genome modifications result in immunostimulatory bacteria that accumulate in the tumor microenvironment and in tumor-resident immune cells, where they express the encoded therapeutic products. The immunostimulatory bacteria provided herein encode one or a plurality of complementary products that stimulate or induce or result in a robust anti-cancer response in the subject. As demonstrated in the examples, the immunostimulatory bacteria provided and described herein reprogram the immunosuppressive tumor microenvironment to an anti-tumor phenotype leading to T-cell infiltration and activation, B-cell infiltration, macrophage repolarization and activation, dendritic cell activity, which induce potent antigen-specific CD8+ T-cell responses. The immunostimulating payload(s), such as the engineered STING and cytokines, results in expression and production of cytokines and other factors leading to anti-tumor immunity, including MHC upregulation.

[0054] Provided are methods of treating a tumor, comprising administering a therapeutic that, upon administration, results in tumor macrophages that have a hybrid M1/M2 phenotype. Exemplary of the methods are those where the resulting M1/M2 macrophages are capable of phagocytosing an apoptotic tumor cell and/or a delivery vehicles. Provided are methods of treating a tumor with a therapeutic, by identifying a subject whose tumor comprises proliferating macrophages; and administering the therapeutic that delivers a payload into the proliferating macrophages and converts them into macrophages with an M1/M2 hybrid phenotype. Provided are therapeutics for use for treatment of tumors in a subject, where: the therapeutic converts proliferating macrophages into M1/M2 hybrid phenotype macrophages; a tumor in the subject had been identified as comprising proliferating macrophages, and the therapeutic comprises a delivery vehicle that has attenuated TLR2, TLR4, and/or TLR5 activity, whereby production of type I IFN by macrophages that comprise the therapeutic in not inhibited. It is shown herein that TLR2, TLR4, and TLR5 activity or response inhibits expression of type I IFN, such as in macrophages. Hence the therapeutics have attenuated TLR2 or TLR2, TLR4 and TLR5 activity.

[0055] Provided are therapeutics that are effective for converting macrophages into an M1/M2 hybrid macrophage. The therapeutics comprise: a delivery vehicle that has attenuated TLR2, TLR4, and/or TLR5 activity, whereby production of type I IFN by macrophages that comprise the therapeutic in not inhibited; and nucleic acid encoding at least two different immunostimulatory proteins, wherein one protein induces type I IFN when introduced into macrophages, and the other stimulates anti-viral or anti-cancer immune responses. The nucleic acid generally is provided in a form, such as in a non-integrative plasmid, that does not integrate into the host cell genome, such as by integration into a chromosome in the genome.

[0056] Provided are methods of converting an immune excluded or immune desert tumor into a T-cell infiltrated tumor, comprising administering a therapeutic, such as those described above and herein, including the immunostimulatory bacteria that have attenuated TLR2/4/5 activity and encode an immunostimulatory protein, into the tumor. The therapeutics, thus, can be used for converting an immune desert tumor into a T-cell infiltrated tumor. Encoded immunostimulatory proteins include, for example, a cytokine, such as IL-15/IL-15R alpha chain complex, and/or a type I interferon (IFN), such as interferon-alpha or interferon-beta, and combinations of the cytokines.

[0057] Provided are methods for detecting subjects likely to or predicted to respond to treatment with a therapeutic comprising a delivery vehicle and non-integrating nucleic acid encoding one or more immunostimulatory proteins, comprising detecting proliferating macrophages, and/or detecting particular markers in a tumor or body fluid sample. Thus, the methods identify a subset of subjects in which the therapeutic is likely to be effective, and excluding subjects in whom it is not likely to be effective. This method can comprise CD68 and PCNA, and/or Ki67 to identify a subject predicted to or likely to respond to treatment with a therapeutic comprising a delivery vehicle and non-integrating nucleic acid encoding one or immunostimulatory proteins.

[0058] These methods, therapeutics, and uses, as well as methods for identifying subjects likely to be responsive to treatment with a therapeutic that converts a macrophage into the M1/M2 hybrid phenotype, include those where response to treatment and/or proliferating macrophage are identified by a combination of markers detectable by immunohistochemistry (IHC) and genetic markers for a particular tumor type. These methods can be effected by obtaining a tumor biopsy or body fluid sample, and detecting proliferating macrophages in the biopsy or sample or detecting a combination of markers detectable by IHC and genetic markers for a tumor type in a subject with a particular cancer or tumor. For example the markers that can be detected by IHC markers C1QC⁺ or SPP1⁺. These markers, shown in the examples, are correlated with particular cancer types, and their use as prognostic markers varies by cancers are shown herein. It also is shown herein that C1QC⁺ or SPP1⁺, depending on tumor or cancer type, can be combined with genetic markers, to identify subjects whose tumors are likely to respond to the therapeutics descried and provided herein. As described herein, these therapeutics are identified as therapeutics that convert macrophages into M1/M2 hybrid phenotype tumors, which are responsive to these therapeutics. Hence the markers and methods described herein for identifying proliferating macrophage and/or tumors with particular markers, identify those in which macrophages will be converted to the hybrid M1/M2 phenotype. Tumors that comprise such macrophage or that have the markers are susceptible to treatment with the therapeutics described and provided herein.

[0059] In some embodiments of the methods, therapeutics and uses are those in which combinations of immunohistochemistry markers and genetic markers for tumor types are used to select subjects for treatment, who are then treated with the therapeutic herein that result in macrophages with the M1/M2 hybrid phenotype. Exemplary combinations of makers and tumor types include, but are not limited to:

[0060] SPP1⁺ and NRF2 pathway alterations in a tumor biopsy or body fluid sample from a subject with a squamous carcinomas, such as, for example a squamous carcinoma selected from among selected lung (LUSC), head and neck (HNSC), cervical (CESC), esophageal (ESCA), bladder (BLCA), and kidney renal papillary (KIRP);
[0061] SPP1⁺ and TP53 mutations in breast cancer (BRCA);
[0062] SPP1⁺ and PI3K mutations in prostate cancer (PRAD);
[0063] SPP1⁺ and BRAF mutations in skin cutaneous melanoma (SKCM);
[0064] C1QC⁺ and HIPPO pathway mutations;
[0065] C1QC⁺ in uterine corpus endometrial cancer (UCEC);
[0066] C1QC⁺ and KMT2A mutations in bladder cancer (BLCA); and
[0067] C1QC⁺ and TP53 pathway mutations in breast cancer (BRCA).

[0068] The therapeutics that are provided and used in the methods and uses are therapeutics that are a tumor-targeted therapy requiring or mediating nucleic acid transfer to immune cells for non-integrating ectopic gene expression; and tumor-targeted therapy is a therapy that is directed to or that accumulates in or is taken up by tumors, the tumor microenvironment, and or tumor-resident immune cells. For example the therapeutics comprise a delivery vehicle and nucleic acid encoding a immunostimulatory protein; the therapeutic has attenuated TLR2 activity, whereby type I IFN is not inhibited in macrophages that comprise the therapeutic or encoded nucleic acid. For example, provided are therapeutics, methods, and uses where: the therapeutic comprises a delivery vehicle and nucleic acid encoding a immunostimulatory protein; and the therapeutic has attenuated TLR2 and TLR4 or TLR2/4/5 activity, whereby type I IFN is not inhibited in macrophages that comprise the therapeutic or encoded nucleic acid.

[0069] Provided are methods for identifying therapeutics that convert macrophages to an M1/M2 phenotype, comprising: a) preparing one or more candidate therapeutics that comprise a delivery vehicle and nucleic acid encoding immunostimulatory proteins, wherein one of the immunostimulatory proteins is induces an anti-viral or anti-cancer immune response, and the other induces type I IFN, and the delivery vehicle is TLR2 or TLR4 or TLR2 and TLR4 or 5, or TLR2/4/5 attenuated, whereby the therapeutic does not inhibit type I IFN in macrophages when introduced into or that infect the macrophages; b) introducing the candidate therapeutic(s) into proliferating macrophages; c) determining the phenotype of the resulting macrophages; and d) selecting a candidate therapeutic(s) therapeutic if the resulting macrophage have a M1/M2 hybrid phenotype.

[0070] Provided are methods of treatment of cancer, comprising administering to a subject, identified as having proliferating macrophage and/or the markers and genetic markers described herein as prognostic of effectiveness of the therapeutics provided herein, a therapeutic that was identified by the above method. Exemplary of methods, therapeutics, and uses provided herein are those where: the therapeutic comprises a delivery vehicle and nucleic acid encoding at least two immunostimulatory proteins: one of the immunostimulatory proteins induces or results in expression of type I IFN in the proliferating macrophages; and another of the immunostimulatory proteins induces or results in expression of anti-cancer or anti-viral cytokines or chemokines or other anti-cancer or anti-viral immunostimulatory effectors. Other exemplary methods, therapeutics and uses are those where: the therapeutic comprises a delivery vehicle containing nucleic acid encoding an immunostimulatory protein that constitutively induces type I IFN in the macrophages; the vehicle does not induce or has reduced TLR2 or reduced TLR2/4/5 induction/response such that type I IFN is not inhibited; and the nucleic acid encoding the immunostimulatory protein is transcribed and translated in the macrophages. Other examples are those where: the therapeutic comprises a delivery vehicle; and the delivery vehicle is a bacterium, a nanoparticle, a virus, or an exosome. For example, the therapeutic can comprise a delivery vehicle selected from among a nanoparticle, a virus, an exosome, a cell, and a bacterium, optionally with the proviso that the delivery vehicle is not a bacterium, or is not a Salmonella species, or is not a STACT species. In other examples, the therapeutic comprises a delivery vehicle and nucleic acid; the delivery vehicle is a lipid nanoparticle, or an attenuated bacterium, or an immune cell, or an oncolytic virus; and the delivery vehicle does not or is modified to attenuate TLR2 activity, whereby expression of type I IFN in the macrophage is not inhibited comprising the therapeutic or delivery vehicle.

[0071] Provided are methods, therapeutics, and uses where the M1/M2 phenotype markers comprise: a) at least two of any of the following markers: Hybrid Markers (lower than M2, higher than M1): SPP1, CD209, CD206; and Induced Markers: MERTK, C1QC, IFN-α2α, IFNβ1, CXCL10, 4-1BBL (TNFSF9), MYC; and/or b) wherein uptake of the therapeutic by M2 macrophage induces a hybrid M1/M2 phenotype that retains M2 phagocytic capacity, upregulates M1-like costimulatory receptors (CD80/86) and lymph node chemotaxis receptors (CCR7), and produces type I IFN-mediated cytokines and chemokines. For example, the macrophage M1/M2 hybrid phenotype markers comprise CD209 and CD206 at levels lower in the resulting macrophage than in M2 macrophage and higher than in M1 macrophage. Other combinations of markers for identification of macrophage with the M1/M2 hybrid phenotype are those where phenotypic markers comprise all of:
[0072] Hybrid Markers (lower than M2, higher than M1): SPP1, CD209, CD206 and/or
[0073] two or more Induced Markers: MERTK, C1QC, IFN-α2α, IFNβ1, CXCL10, 4-1BBL (TNFSF9), MYC; or
[0074] those where the phenotypic markers comprise:
[0075] Hybrid Markers (lower than M2, higher than M1): SPP1, CD209, CD206 and/or
[0076] all of Induced Markers: MERTK, C1QC, IFN-α2α, IFNβ1, CXCL10, 4-1BBL (TNFSF9), and MYC.

[0077] For example, the macrophage phenotype that is induced or results from treatment with the therapeutics herein, such as a therapeutic that has attenuated TLR2/4/5 activation so that type I IFN expression is not inhibited, and that encodes in a non-integrating nucleic acid vehicle, such as a plasmid, IL-15/IL-15R alpha chain complex+eSTING (a STING described herein that has constitutive activity), the marker profile post-treatment is:

| | | | Post- |
|---|---|---|---|
| Class | Target | Function | Treatment |
| Co- | CD80 | Co-stimulatory Signal | Upregulated |
| stimulatory | CD86 | Co-stimulatory Signal | Upregulated |
| molecules | | | |
| Chemokine | CCR7 | Lymphocyte node (LN) | Upregulated |
| | | homing of T-cells and DCs | |
| signaling | CXCL10 | Recruit T-cells | Upregulated |
| | CXCL11 | Recruit T-cells | Upregulated |
| Pattern | CD14 | Microbial-targeting (LPS) | Upregulated |
| recognition | CD206 | Microbial-targeting | Downregulated |
| receptors | | (mannose) | (upregulated |
| | | | relative to M1) |
| | CD209 | Enhanced phagocytosis, | Downregulated |
| | | microbial-targeting (high | (upregulated |
| | | mannose), viral pathogen | relative to M1) |
| | | clearance, cell trafficking, | |
| | | immune synapse formation, | |
| | | T-cell proliferation | |
| Scavenger | CD68 | Tumor-associated | Upregulated |
| receptors | | macrophages (TAMs) | |
| | CD163 | Microbial targeting ) | Upregulated |
| | | (gram-negative | |

[0078] or, wherein markers post-treatment that are upregulated in the resulting macrophages are co-stimulatory molecules CD80, CD86, chemokine signaling CCR7, CXCL10, CXCL11, PRRs (pattern recognition receptors), which are upregulated relative to M1, downregulated relative to M2 macrophage, CD206, CD209; and scavenger receptors upregulated CD68, CD163.

[0079] In the methods, therapeutics, and uses provided herein, proliferating macrophages, such as proliferating M2 macrophages, can be identified by the presence of biopsy surface markers: CD68+KI67 and/or PCNA, MERTK, and or by gene expression of the G2M module, where half or more than half (≥ or >14 genes of the set) are expressed, and optionally STMN1 is expressed. The proliferating macrophages also can be identified by STMN1+the G2M module with at least half of the genes, such as ≥ or >14 genes of the set, or by the G2M module with at least half of the genes, or by the markers CD68, MERTK, and K167 and/or PCNA. For example, the M1/M2 hybrid phenotype is characterized by or identify by Hybrid Markers (lower than M2, higher than M1): SPP1, CD209, CD206, such as, for example, where the phenotype comprises induced markers: MERTK, C1QC, IFN-α2a, IFNβ, CXCL10, 4-1BBL, and/or MYC.

[0080] In some embodiments, the hybrid M1/M2 macrophage phenotype is characterized by the following markers: Hybrid Markers (lower than M2, higher than M1): SPP1, CD209, CD206 and/or Induced Markers: MERTK, C1QC, IFN-α2a, IFNβ, CXCL10, 4-1BBL, MYC. In others the resulting macrophages are CIQC^{hi}SPP1^{low}. In all embodiments, the macrophages that comprise the therapeutic or delivery vehicle can be proliferating macrophages, such as proliferating M2 macrophages that, upon expression of the encoded payload in the therapeutic, are converted to M1/M2 hybrid phenotype macrophages.

[0081] As described above and herein, the therapeutics that result in the M1/M2 hybrid phenotype in macrophages include those that comprise nucleic acid, generally in a form that is non-integrative, whereby it does not integrate into a host genome. The nucleic acid encodes immunostimulatory proteins, including those and combinations described in this disclosure, such as, but are not limited to, a cytokine and a constitutive STING.

[0082] Provided are method of treating a tumor, comprising: identifying a subject whose tumor comprises proliferating macrophages; and administering a therapeutic that delivers a non-integrating genetic payload into the proliferating macrophages, whereby the encoded payload is transcribed.

[0083] Also provided are methods of increasing the therapeutic effect of an immunostimulatory bacterium, such as those provided herein, the method comprising administering an apoptosis-promoting agent prior to administration of the immunostimulatory bacterium to a subject. Exemplary of an agent that promotes tumor apoptosis are chemotherapeutic agents, such as, for example, agents selected from among docetaxel (DTX), paclitaxel (PTX), doxorubicin (DOX), 5-fluorouracil (5-FU), carboplatin (CARB), cyclophosphamide (CTX), and other such chemotherapeutics.

[0084] Also provided are methods of increasing the therapeutic effect(s) of an immunostimulatory bacterium in a subject by pre-treatment of the subject with anti-PD-1 treatment to suppress PD-1 expression on macrophages to thereby promote their phagocytic capacity prior to or with the immunostimulatory bacteria, and, after administering the immunostimulatory bacterium, treating with anti-PD-L1 after a sufficient time so that the nucleic acid encoding the payload(s) is delivered to the macrophages, so that PD-L1 is then induced on macrophages.

[0085] Provided are methods of treatment of cancer and uses of the therapeutics for treatment of cancer. Provided are methods of treatment of cancer, comprising administering an immunostimulatory bacterium to a subject who has been pretreated with an apoptosis-promoting agent prior to the administration of the immunostimulatory bacterium to the subject. Provided are methods of treatment of cancer in a subject, comprising: first treating the subject with an apoptosis-promoting agent; and then administering an immunostimulatory bacterium. These include methods and uses in which the therapeutic, such as the immunostimulatory bacterium, when administered, converts macrophage to an M1/M2 hybrid phenotype. Exemplary of the immunostimulatory bacterium are those that have TLR2, TLR4, and/or TLR5 activity, whereby production of type I IFN by macrophages that comprise the therapeutic is not inhibited; and nucleic acid encoding at least two different immunostimulatory proteins, wherein one protein induces type I IFN when introduced into macrophages, and the other stimulates anti-viral or anti-cancer immune responses.

[0086] Also provided are methods and uses of increasing the therapeutic effect of an immunostimulatory bacterium in a subject, comprising: pre-treating the subject with anti-PD-1 antibody or other PD-1 antagonist to suppress PD-1 expression on macrophages in the tumor of the subject to thereby promote their phagocytic capacity; administering the immunostimulatory bacterium, wherein the bacterium encodes one or more immunostimulatory protein(s); and then, after a sufficient time so that the nucleic acid encoding the payload(s) is delivered to the macrophages, treating with an anti-PD-L1 agent. Provided are methods and uses of increasing the therapeutic effect of an immunostimulatory bacterium in a subject, comprising pre-treatment of the subject with anti-PD-1 antibody or other antagonist to suppress PD-1 expression on macrophages to thereby promote their phagocytic capacity prior to or with the immunostimulatory bacteria, and them administering the immunostimulatory bacterium. In these embodiments, the anti-PD-1 treatment can be administered at least about 3, 6, 12, 24, 36, 48, or more hours, such as about two days, before administration of the immunostimulatory bacterium. Anti-PD-1 agents include antagonists and antibodies, which include antibodies and single chain or other forms thereof that bind or inhibit PD-1.

[0087] In accord with the method, therapeutics and uses provided herein, subjects that are selected for treatment with the therapeutic that encodes a non-integrating nucleic acid are identified by obtaining a biopsy of a tumor or body fluid from the subject; and selecting a subject for treatment if the phagocytes in the biopsy of the tumor or body fluid are proliferating. Body fluids include, but are not limited to, urine, blood, plasma, sweat, CSF, and other such samples. Proliferating macrophage can be identified by detecting the following markers: tumor gene expression of G2M module (>14 genes of the set) alone or +Stathmin1 (STMN1); and/or biopsy surface markers: CD68+KI67 and/or PCNA, MERTK; and/or SPP1 in lung or gastric tumors; and/or C1QC in colon and breast cancers. In embodiments of the methods, therapeutics, and uses, the macrophages are M2 macrophages.

[0088] The therapeutics herein that convert macrophages into M1/M2 hybrid phenotype macrophages, also can be used to treat fibrotic diseases. The phenotype is effective for treatment of fibrotic disease; hence any of the therapeutics provided herein that convert the phenotype can be used for such treatment.

[0089] In the methods, therapeutics, and uses, the therapeutics comprise nucleic acid encoding immunostimulatory proteins; the encoded proteins can comprise a cytokine and a cytosolic DNA/RNA sensor that induces expression of type I IFN; and the cytosolic DNA/RNA sensor is modified to have increased or constitutive activity in inducing type I IFN. The cytosolic DNA/RNA sensor can be modified to have constitutive activity, whereby type I IFN is induced in the absence of ligands and/or cytosolic DNA/RNA. Exemplary cytosolic DNA/RNA sensors and modified forms thereof are described and exemplified below.

[0090] The therapeutics, methods and uses include those where therapeutic comprises a delivery vehicle and nucleic acid, such as DNA, where the delivery vehicle has attenuated or eliminated TLR 2, particularly TLR/2/4/5 induction, and encodes a cytokine and a STING pathway protein that constitutively induces type I IFN to result in a hybrid M1/M2 proliferating and phagocytic macrophage phenotype.

[0091] In other embodiments, the therapeutics for use in the methods and uses and identified by screening methods are those where: the nucleic acid in the therapeutic encodes a immunostimulatory protein that is selected from among STING, MDA5, IRF-3, IRF-7, and RIG-I; and the immunostimulatory protein comprises a modification(s) that is a gain-of-function (GOF) mutation(s) that renders the STING, MDA5, IRF-3, IRF-7, or RIG-I constitutively active, whereby expression of type I IFN is constitutive.

[0092] The therapeutics for use herein and in the described and claims methods and uses, include any described herein, or any that comprise nucleic acid, generally non-integrating, such as in a non-integrating (into the genome) plasmid, encoding an immunostimulatory protein, particularly provided in a delivery vehicle that does not inhibit TLR2, or TLR2, TLR4, and/or TLR5. The nucleic acid can encode any of the payloads and combinations thereof described herein, and the therapeutic includes the immunostimulatory bacteria provided herein or immunostimulatory bacteria known in the art that have the requisite properties.

[0093] Because of the similarity in the immune response between an anti-tumor response and an anti-viral response, immunostimulatory bacteria provided herein also can be used to treat infectious diseases. The immunostimulatory bacteria can encode an anti-viral or anti-bacterial therapeutic, such as an inhibitor of a viral or bacterial product, or an inhibitor of the expression of a viral or bacterial product, or a viral or bacterial antigen. The combination of the immune response from the immunostimulatory bacteria and the therapeutic anti-pathogen product, and also to the immunostimulatory proteins and other such therapeutics, provides a therapeutic immunostimulatory bacterium for vaccinating against and/or for treating infectious diseases, particularly diseases associated with viral infections, such as chronic viral infections and latent viral infections. Of interest are chronic viral infections, such as infections by hepatitis viruses, herpesviruses, varicella zoster virus (VZV), Epstein-Barr virus (EBV), human immunodeficiency virus (HIV), human T-cell leukemia virus (HTLV), Respiratory Syncytial Virus (RSV), measles virus, and other such viruses that chronically infect subjects. The immunostimulatory bacteria also can be used for treatment of acute infections as well, such as initial infections with chronic influenza, P. gingivalis, and coronaviruses, such as Severe Acute Respiratory Syndrome coronavirus (SARS-CoV), Middle East Respiratory Syndrome coronavirus (MERS-CoV), and Severe Acute Respiratory Syndrome coronavirus 2 (SARS-CoV-2, which causes COVID-19). Targeted pathogenic bacteria also include, for example, species of Escherichia, Staphylococcus, Pseudomonas, and Porphyromonas.

[0094] Also provided herein are immunostimulatory bacteria that can be used and/or formulated as vaccines for administration into tissues, such as by intramuscular injection, inhalation, and other such direct routes. These bacteria are designed to be non-replicating in vivo, and, thus, comprise a nutritional auxotrophy, such as a thyA⁻ so that they do not express active thymidylate synthase, and they encode the payload under control of a promoter recognized in the bacterium. If they are intended to deliver protein payloads to a vaccinated host, the encoded payloads include sequences or are designed so that they are translated in the bacterial host. If they are intended to deliver RNA, then the encoding nucleic acids are designed so that the bacterial ribosomes cannot translate them, but so that eukaryotic ribosomes can translate them. This can be effected, for example, by including an IRES in the encoding nucleic acid. The payloads of the vaccines include nucleic acid encoding the immunizing antigen or protein, such as an antigen from a viral or bacterial pathogen. Payloads also can include immunostimulatory proteins, such as a product, such as STING, particularly modified STING, that is part of a cytosolic DNA/RNA sensor pathway that leads to expression of type I interferon (IFN), and also, optionally, a cytokine, such as an IL-15, such as IL-15/IL-15R alpha chain complex. The vaccines are formulated for a suitable route of administration, and include aerosols and emulsions, tablets, and powders.

[0095] The immunostimulatory bacteria provided herein can encode an antigen or antigens from a pathogen, such as a viral antigen, and are used as a vaccine to prevent infection, or to treat existing infections. Antigens include, but are not limited to, any that are known to those of skill in the art to elicit an immmunoprotective response or to ameliorate a disease resulting from the pathogen. These immunostimulatory bacteria, by virtue of the ability to accumulate in immune cells, such as antigen-presenting cells, can prime the T-cell response to a pathogen, such as a virus. For example, as described in detail herein, among the immunostimulatory bacteria provided herein are those that are deficient in asparaginase IL, an enzyme that suppresses the function of T-cells. Any of the immunostimulatory bacteria described and provided herein can be used. For example, it is described and shown herein, that eliminating asparaginase II activity, such as by modifying the bacterial genome to eliminate expression of active enzyme, can be used to encode an antigen or combination of antigens. The resulting bacteria promote an anti-pathogen, such as anti-viral, T-cell response. The combination of expression of an antigen, such as from a pathogen, bacterial or viral or other, with the ability to accumulate in immune cells, such as antigen-presenting cells, provides protection from infection by the pathogen. For example, the immunostimulatory bacteria can encode a viral antigen, such as an antigen from an essential viral core protein shared among a family of viruses or across viral families. For example, in the case of a coronavirus, such as SARS-COV2, an antigen from the nucleocapsid and/or non-structural M proteins can enhance CD8⁺ T-cell responses to heavily conserved and less mutated core proteins, thereby providing broad pan-coronavirus protection, to provide effective vaccines and treatments. Proteins and antigens from this corona virus and corona virus family that are used for immunization and/or treatment are known, and exemplary ones are described herein and known to those of skill in the art. In addition to spike proteins, portions thereof, and modified spike proteins, other proteins have been identified for this purpose. See, e.g., Cohen et al., (2021) Cell Reports Medicine 2:1000354.

[0096] The immunostimulatory bacteria can encode an anti-viral therapeutic or anti-bacterial therapeutic. Such therapeutics include inhibitors of viral genes and proteins, such as proteins required for replication and/or packaging, or the immunostimulatory bacteria can encode a therapeutic that prevents binding or interaction of a virus with a receptor or receptors that facilitate or provide for viral entry into a target cell. In some embodiments, expression of the encoded therapeutic protein, such as the antigen or antigenic protein, can be under the control of a prokaryotic promoter. In other embodiments, the protein can be expressed under control of a eukaryotic promoter. The choice of promoter depends upon whether it is to be expressed in the bacterium, such as before administration as described herein for delivery of mRNA that is translated in the host, or the protein is to be expressed in the host cells, such as immune cells, after delivery.

[0097] The immunostimulatory bacteria provided herein include genome modifications, such as deletions, disruptions, and other alterations that result in inactive encoded product, such as changing the orientation of all or part of the gene, so that functional gene products are not expressed. Among the immunostimulatory bacteria provided are those that are modified so that the resulting bacteria are msbB⁻/purI⁻. In some embodiments, the bacteria are msbB⁻ and purI⁻, whereby the full length of at least the coding portion of the msbB and/or purI genes are/is deleted. The genome of the bacteria also can be modified so that the bacteria lack flagella. This is effected in bacteria that normally express flagella. In such bacteria, for example, the fliC and fljB genes in Salmonella, or equivalent genes in other species to fliC and fljB, can be deleted or otherwise modified so that functional gene product is not expressed. The bacteria also can be modified so that they are adenosine auxotrophs, and/or are msbB⁻/pagP⁻. Also provided are immunostimulatory bacteria and pharmaceutical compositions containing them, where the bacteria do not express L-asparaginase IL, whereby the bacteria are ansB⁻. Elimination of the encoded asparaginase activity improves or retains T-cell viability/activity. Therapeutic bacteria, such as inactivated or attenuated bacteria that are used as vaccines, can be improved by modifying the bacterial genome to eliminate asparaginase activity. Exemplary of such vaccines is the BCG (Bacillus Calmette-Guérin) vaccine and related vaccines, which are used to immunize against tuberculosis. The BCG vaccine is known to have variable effectiveness; eliminating the asparaginase can improve the effectiveness of such vaccine, because the endogenous bacterial asparaginase inhibits or reduces T-cell activity.

[0098] Provided herein are immunostimulatory bacteria that contain a plasmid encoding a therapeutic product, or combinations of therapeutic products, under control of a eukaryotic promoter. The genomes of the bacteria can contain modifications, such as one, two, or more modifications, selected from among:
[0099] a) deletion or disruption of all or of a sufficient portion of a gene or genes, whereby the bacterium has been modified to generate penta-acylated lipopolysaccharide (LPS), wherein:
[0100] the genome of the immunostimulatory bacterium is modified by deletion or disruption of all or of a sufficient portion of a gene or genes, whereby the bacterium has been modified to generate penta-acylated lipopolysaccharide; and
[0101] hexa-acylated lipopolysaccharide is substantially reduced, by at least 10-fold, compared to the wild-type bacterium, or is absent;
[0102] b) deletion or disruption of all or of a sufficient portion of a gene or genes, whereby the bacterium has attenuated recognition by Toll-like Receptors (TLR) 2, TLR4, and/or TLR5;
[0103] c) deletion or disruption of all or of a sufficient portion of a gene or genes, whereby the bacterium does not activate the synthesis of curli fimbriae and/or cellulose;
[0104] d) deletion or disruption of all or of a sufficient portion of a gene or genes, whereby the bacterium does not activate the synthesis of secreted asparaginase;
[0105] e) deletion or disruption of all or of a sufficient portion of a gene or genes, whereby the bacterium is auxotrophic for purines, for adenosine, and/or for ATP;
[0106] f) deletion or disruption of all or of a sufficient portion of a gene or genes, whereby the bacterium lacks flagella;
[0107] g) deletion or disruption of all or of a sufficient portion of a gene or genes, whereby the bacterium has been modified to specifically infect tumor-resident myeloid cells;
[0108] h) deletion or disruption of all or of a sufficient portion of a gene or genes, whereby the bacterium has been modified to specifically infect tumor-resident myeloid cells, and is unable to replicate in tumor-resident myeloid cells; and
[0109] i) deletion or disruption of either or both of lppA and lppB, to decrease or eliminate lipoprotein expression in the membrane, whereby expression of an encoded therapeutic protein is increased in the tumor microenvironment and/or in tumor-resident immune cells.

[0110] For example, the immunostimulatory bacteria contain modifications, including deletions, insertions, and replacements, of a), d), and f), or modifications c) and d), or modifications a), c), d), e), and f), or modifications a), c), d), e), f), and i), or modifications a), d), f), and i), or modifications c), d), and i), or modifications f) and i), or modifications a)-i), or modifications a), b), d), and f), or modifications a), b), c), and d), and other combinations of modifications a)-i). Deletion or disruption includes any modification of a gene whereby active gene product is not expressed.

[0111] In particular, provided are immunostimulatory bacteria whose genomes are modified by deletion or disruption, including by insertion, of all or of a sufficient portion of a gene or genes, whereby the bacteria have attenuated recognition by TLR2, TLR4, and TLR5. Such bacteria have low toxicity and accumulate in/colonize the tumor microenvironment and tumor-resident myeloid cells, such as macrophages. These bacteria contain plasmids that encode therapeutic products, particularly combinations of complementary products, such as a cytokine and a modified STING polypeptide, including gain-of-function/constitutively active STING proteins, STING chimeras, and chimeric STING proteins that include gain-of-function (GOF) mutations. The cytokines include, for example, IL-15/IL-15R alpha chain complex (also referred to herein as IL-15Rα/IL-15sc, or IL-15/IL-15Rα, or IL-15 complex), or IL-15, or IL-12, or other anti-tumor immune stimulating cytokines or chemokines. The bacteria can additionally encode other products, such as anti-tumor antibodies. Combinations of products are described and provided herein. The combinations of products that stimulate or promote an anti-tumor response and/or deliver a therapeutic product, are described throughout the disclosure herein, and they are delivered by the immunostimulatory bacteria whose genomes are modified so that the bacteria have low toxicity and effectively colonize tumors, the tumor microenvironment, and/or tumor-resident immune cells, such as macrophages. Exemplary of such bacteria are those of species, such as Salmonella, Listeria, and Escherichia, that are modified so that they do not have flagella, and are modified so that they contain lipopolysaccharide (LPS) with penta-acylated lipid A, such as by rendering the bacteria msbB⁻/pagP⁻. The bacteria additionally can be modified by elimination of curli fimbriae and/or have reduced or eliminated cellulose production and biofilm formation, such as by modifying the bacteria so that they are csgD⁻. It is shown herein that bacteria with these modifications have no maximum tolerated dose (MTD), and exhibit high tumor colonization.

[0112] In all embodiments, the immunostimulatory bacteria also can comprise or further comprise deletion of or disruption of the genes encoding the flagella, whereby the bacterium is flagellin⁻ (such as, for example, fliC⁻/fljB⁻ in Salmonella) and does not produce flagella (i.e., can be referred to as flagellin deficient or flagellin⁻), where the wild-type bacterium has flagella. The immunostimulatory bacteria can be auxotrophic for purines, such as auxotrophic for adenosine; or auxotrophic for adenosine, adenine, and/or ATP. The immunostimulatory bacteria also can be purI⁻. The immunostimulatory bacteria also can be pagP⁻. The immunostimulatory bacteria also can be aspartate-semialdehyde dehydrogenase⁻ (asd⁻), such as where the bacterium is asd by virtue of disruption or deletion of all or a portion of the endogenous gene encoding aspartate-semialdehyde dehydrogenase (asd), whereby endogenous asd is not expressed. The bacteria can encode aspartate-semialdehyde dehydrogenase (asd) on the plasmid under control of a bacterial promoter. The immunostimulatory bacteria also can be msbB⁻, or can be pagP⁻/msbB⁻. For example, the immunostimulatory bacteria can be asd⁻, purI⁻, msbB⁻, flagellin⁻ (such as fliC⁻/fljB⁻), and pagP⁻, or they can be asd⁻, csgD⁻, purI⁻, msbB⁻, flagellin⁻ (such as fliC⁻/fljB⁻), and pagP⁻. In some embodiments, the immunostimulatory bacteria are ansB⁻, asd⁻, csgD⁻, purI⁻, msbB⁻, flagellin⁻ (such as fliC⁻/fljB⁻), and pagP⁻.

[0113] Provided are immunostimulatory bacteria that contain a plasmid encoding a therapeutic product under control of a eukaryotic promoter, or that encode a plurality of products under control of a plurality of eukaryotic promoters, or under control of a single promoter. The genome of the immunostimulatory bacteria is modified by deletion of a sufficient portion of a gene or genes, or by the disruption of a gene or genes, whereby the bacterium is one or more of ansB⁻, asd⁻, csgD⁻, purI⁻, msbB⁻, flagellin⁻ (such as fliC⁻/fljB⁻), and pagP⁻. The immunostimulatory bacteria provided herein also include those that have the genes lppA (lpp1) and/or lppB (lpp2), which encode major outer membrane lipoproteins Lpp1 (LppA) and Lpp2 (LppB), respectively, deleted or disrupted, to eliminate or substantially reduce expression of the encoded lipoprotein(s). In particular, the immunostimulatory bacteria are lppA- and lppB⁻. Provided are immunostimulatory bacteria that contain a plasmid encoding an anti-cancer therapeutic, or an anti-pathogen therapeutic, under control of eukaryotic regulatory sequences, and that are lppA⁻ and lppB⁻. For example, the immunostimulatory bacteria can be ansB⁻, asd⁻, csgD⁻, purI⁻, msbB⁻, flagellin⁻ (such as fliC⁻/fljB⁻), pagP⁻, lppA⁻, and/or lppB⁻.

[0114] In embodiments herein, the therapeutic product is an anti-cancer therapeutic or a therapeutic used in cancer therapy. The encoded product(s) can be operably linked to nucleic acid encoding a secretion signal, whereby, when expressed, the therapeutic product is secreted, such as secreted from a tumor-resident immune cell.

[0115] Any of the immunostimulatory bacteria also can have one or more genes or operons, involved in Salmonella pathogenicity island 1 (SPI-1) invasion, deleted or inactivated, whereby the immunostimulatory bacteria do not invade or infect epithelial cells. For example, the one or more genes/operons are selected from among avrA, hilA, hilD, invA, invB, invC, invE, invF, invG, invH, invI, invJ, iacP, iagB, spaO, spaQ, spaR, spaS, orgA, orgB, orgC, prgH, prgI, prgJ, prgK, sicA, sicP, sipA, sipB, sipC, sipD, sirC, sopB, sopD, sopE, sopE2, sprB, and sptP.

[0116] The plasmid in the immunostimulatory bacteria can be present in low copy number or medium copy number. The plasmid can contain a medium-to-low copy number origin of replication, such as a low copy number origin of replication. The plasmid may be present in medium-to-low copy number depending on the ORI sequence, the size of the plasmid, and culturing conditions. In some embodiments, the plasmid is present in higher copy number. Generally, medium copy number is less than 150 or less than about 150, and more than 20 or about 20, or is between 20 or 25 and 150; and low copy number is less than 25, or less than 20, or less than about 25, or less than about 20 copies. In particular, low to medium copy number is less than about 150 copies, or less than 150 copies; low copy number is less than about 25 copies, or less than 25 copies.

[0117] Encoded therapeutic products include nucleic acids and proteins. The plasmid can encode two or more therapeutic products. Exemplary products include, but are not limited to, a cytokine, a protein that constitutively induces a type I IFN, and a co-stimulatory receptor or ligand. Further exemplary combinations are described below. In some embodiments, the co-stimulatory molecule lacks all or a portion of the cytoplasmic domain for expression on an antigen-presenting cell (APC), whereby the truncated molecule is capable of constitutive immuno-stimulatory signaling to a T-cell through co-stimulatory receptor engagement, and is unable to counter-regulatory signal to the antigen-presenting cell (APC), due to the deleted cytoplasmic domain or deleted portion thereof.

[0118] The encoded therapeutic products can be operatively linked to nucleic acid encoding regulatory sequences recognized by a eukaryotic host, such as, for example, secretion signals, to effect secretion from a cell comprising the bacterium or plasmid. In embodiments where the immunostimulatory bacteria encode two or more products, expression of each product can be under control of a separate promoter. Alternatively, two or more products can be expressed under control of a single promoter, and each product is separated by nucleic acid encoding, for example, an internal ribosomal entry site (IRES), or a 2A peptide, to effect separate expression of each encoded therapeutic product. Exemplary 2A peptides are T2A, F2A, E2A, or P2A, which can flank nucleic acids encoding the therapeutic products, to effect separate expression of the therapeutic products expressed under control of a single promoter. The therapeutic products are expressed under control of a eukaryotic promoter, such as an RNA polymerase (RNAP) II promoter, or an RNA polymerase III promoter. These include an RNA polymerase II promoter that is a viral promoter, or a mammalian RNA polymerase II promoter, such as, but not limited to, a cytomegalovirus (CMV) promoter, an SV40 promoter, an Epstein-Barr virus (EBV) promoter, a herpesvirus promoter, an adenovirus promoter, an elongation factor-1 alpha (EF-1α) promoter, a UBC promoter, a PGK promoter, a CAGG promoter, an adenovirus 2 or 5 late promoter, an eIF4A1 promoter, a CAG promoter, or a CD68 promoter. The plasmids further can include other eukaryotic regulatory sequences, such as terminators and/or promoters, selected from among SV40, human growth hormone (hGH), bovine growth hormone (bGH), MND (a synthetic promoter that contains the U3 region of a modified MoMuLV LTR with myeloproliferative sarcoma virus enhancer), chicken beta-globulin, and rbGlob (rabbit globulin) genes, to control expression of the therapeutic product(s). Other regulatory sequences include a poly(A) tail, a Woodchuck Hepatitis Virus (WHP) Posttranscriptional Regulatory Element (WPRE), and a Hepatitis B virus Posttranscriptional Regulatory Element (HPRE).

### Immunostimulatory Bacteria and Vaccines

[0119] Provided are immunostimulatory bacteria that comprise a plasmid that encodes a therapeutic product; the bacteria comprise genome modifications, such as insertions, deletions, replacements, transposons, whereby the bacterium does not produce active thymidylate synthase, and requires supplementation for growth. Supplementation includes nutrients that can bypass the reactions catalyzed by thymidylate synthase so that the bacteria can replicate. Supplementation includes one or more of thymine, thymine derivatives, thymidine, thymidine derivatives, thymine precursor(s), thymidine precursor(s), or thymidine monophosphate precursor(s). The bacteria can additionally comprise additional modifications reduce or eliminate activation of TLR2, and optionally TLR4 and/or TLR5 in a host, such as a human or other mammal.

[0120] Also provided are immunostimulatory bacteria that comprise a plasmid that encodes a therapeutic product, where the bacterium comprises genome modifications, whereby the bacterium does not secrete active asparaginase; and the bacterium comprises genome modifications that reduce or eliminate activation of TLR2, and optionally TLR4 and/or TLR5 in a host.

[0121] These immunostimulatory bacteria additionally can include genome modifications, by deletion or disruption or modification of all or of a sufficient portion of the gene ansB encoding L-asparaginase II, whereby the bacterium is ansB⁻ and does not express active L-asparaginase II.

[0122] Also provided are immunostimulatory bacterium, comprising genome modification(s) that reduce or eliminate activation of TLR2, whereby induction of type I interferon (IFN) is not inhibited by TLR2, where: the immunostimulatory bacterium comprises genome modification(s) whereby it cannot replicate in vivo, but can replicate when grown in vitro with nutritional supplementation; and the genome modification(s) eliminate(s) or inactivate(s) thymidylate synthase, whereby the bacterium is thyA⁻ and/or asd⁻ or both.

[0123] It is described herein that activation of TLR2 can inhibit induction of type I IFN. It is shown herein that expression of a protein, such as a STING protein by a bacterium or to delivery vehicle that activates TLR2, or TLR4/5 and TLR2, is not an advantageous combination since activation of the TLRs, such as TLR2, inhibits type I interferon. Type I IFN is, for example, an interferon-α and/or interferon-β.

[0124] Provided are immunostimulatory bacteria that comprise genome modifications whereby activation of TLR2 is reduced or eliminated, whereby induction of type I IFN is not inhibited by TLR2, wherein the immunostimulatory bacterium comprises a plasmid that encodes an interferon, or encodes a modified STING protein that constitutively induces type I interferon, and encodes an antigen or protein from a pathogen or tumor. These bacteria also can include genome modifications whereby TLR4 and/or TLR5 activation/induction is reduced or eliminated.

[0125] Provided are immunostimulatory bacteria that comprise a plasmid encoding a therapeutic product, where: the genome of the immunostimulatory bacterium is modified by deletion or disruption of all or of a sufficient portion of a gene or genes, whereby the bacterium has been modified to generate lipopolysaccharide (LPS) with penta-acylated lipid A; lipopolysaccharide with hexa-acylated lipid A is substantially reduced, by at least 10-fold, compared to the wild-type bacterium, or is absent; the genome of the bacterium is modified, whereby the bacterium itself does not inhibit or prevent induction of type I interferon (IFN) in an infected immune cell; and the genome of bacterium is modified to be auxotrophic for an essential nutrient. For example provided are immunostimulatory bacterium with genome modifications, whereby the bacterium does not encode or produce active asparaginase and/or thymidylate synthase. Any of the immunostimulatory bacteria provided herein can have genome modifications that comprise deletions, insertions, and/or replacements whereby the bacterium is thyA⁻ and/or asd⁻ or both thyA⁻ and asd⁻. Additionally, in some embodiments in which the bacteria are asd⁻ by virtue of genome modifications, the bacteria can include nucleic acid encoding asd on the plasmid such that it is expressed in vivo. The particular embodiments and applications for particular auxotrophies and complementation on the plasmid are described in the detailed description and/or known to those of skill in the art.

[0126] Also provided are immunostimulatory bacteria, comprising a plasmid encoding a therapeutic product, where: the genome of the immunostimulatory bacterium is modified by deletion or disruption or translocation of all or of a sufficient portion of a gene or genes, whereby the bacterium has been modified to generate lipopolysaccharide (LPS) with penta-acylated lipid A; lipopolysaccharide with hexa-acylated lipid A is substantially reduced, by at least 10-fold, compared to the wild-type bacterium, or is absent; and the genome of bacterium is modified whereby it does not produce active thymidylate synthase, whereby the bacterium is thyA⁻.

[0127] Also provided are immunostimulatory bacteria that comprise a plasmid encoding a therapeutic product, where: the genome of the immunostimulatory bacterium is modified by deletion or disruption of all or of a sufficient portion of a gene or genes, whereby the bacterium lacks flagella; the unmodified immunostimulatory bacterium has flagella; and the genome of the bacterium is modified, whereby it does not produce active thymidylate synthase.

[0128] Any of the immunostimulatory bacteria provided herein can have genome modifications, such as modifications that render the bacteria csgD⁻, whereby the bacteria lack curli fimbriae. Any of the immunostimulatory bacteria can comprises genome modifications that reduce or eliminate activation of TLR4 and/or TLR5. The immunostimulatory bacteria provided herein can comprise genome modifications that result in a bacterium that does not have flagella; and the wild-type of the bacterium has flagella. These bacteria further can have genome modification whereby they do not produce curli fimbriae. They also can comprise genome modifications that result in penta-acylated lipopolysaccharides. Thus, the bacteria provided herein can lack flagella and be msbB⁻/pagP⁻.

[0129] Provided herein are immunostimulatory bacteria, comprising genome modifications that reduce or eliminate activation of TLR2, whereby induction of type I IFN is not inhibited by TLR2, where: the immunostimulatory bacterium can replicate in vivo in a eukaryotic host; and the immunostimulatory bacterium comprises a plasmid that encodes a therapeutic product or products that include tumor-associated antigen, or encodes a tumor antigen and a product that is part of a cytosolic DNA/RNA sensor pathway that leads to expression of type I interferon (IFN), or the encoded product is a type I IFN that is interferon-alpha or is interferon-beta, or the encoded product is both IFN-alpha and IFN-beta, such as a STING protein, or encodes a tumor-associated antigen and interferon alpha, or encodes a tumor-associated antigen and interferon beta. Among the products that are part of the cytosolic DNA/RNA sensor pathway, such as modified protein that results in increased induction of type I interferon, such as a STING protein that is a modified STING protein that has increased induction of type I interferon compared to the unmodified human STING protein. Modified STING proteins include, for example any described below, that have result in increased or constitutive expression or induction of type I interferon, particularly compared to unmodified human STING protein. The modified STING proteins additionally can have reduced NF-κB signaling compared to wild-type human STING protein. Included are chimeric STING proteins as described herein (see, also International PCT Publication WO 2020/176809, and US Publication No. 2020/027061). For example, the STING protein is one that comprises replacements corresponding to N154S, R284G, or N154S/R284G, with reference to a human STING protein. Exemplary immunostimulatory bacteria are those that encode a modified STING protein that constitutively induces type I interferon and a tumor antigen and/or a cytokine, such as an IL-15 receptor complex. The immunostimulatory bacteria have genome modifications whereby the bacteria is/are flagellin deficient so that they do not have flagella and have penta-acylated LPS, such as by virtue of genome modifications that render the bacteria msbB⁻/pagP⁻. The bacteria also can lack curli fimbriae, such as by virtue of genome modifications that render them csgD⁻. The bacteria optionally are auxotrophic for a required nutrient, such as bacteria that are thyA⁻ and/or adenosine auxotrophs, or other such auxotrophy. The bacteria also can be ansB⁻. The particular combination of genome modifications, as described herein, depends upon the intended use of the bacteria and desired effects as does the particular selection of encoded therapeutic products. As described herein the promoters and other regulatory sequences that control expression of the encoded products also depends upon the intended use of bacteria. As described throughout the disclosure herein, the therapeutic proteins encoded on the plasmids can be under control of eukaryotic regulatory sequences, such as, for example, for anti-tumor therapy embodiments, or can be under control of bacterial promoters for embodiments, such as, for example, as certain vaccines in which the encoded proteins or RNA are intended for delivery

[0130] With respect to encoded products, that immunostimulatory bacteria can encode a therapeutic product that is part of a cytosolic DNA/RNA sensor pathway that leads to expression of type I interferon (IFN), or the encoded product is interferon-alpha or is interferon-beta, or the encoded product is both IFN-alpha and IFN-beta. Other products include cytokines, antibodies, bi-specific engager antibodies, and tumor antigens, or other antigens, such as pathogen antigens for vaccination. Exemplary of a therapeutic product that is part of a cytosolic DNA/RNA sensor pathway that leads to expression of type I interferon (IFN) is a STING protein, particularly one that is modified to have increased, particularly, constitutive activity, so that sensing of cytosolic DNA/RNA or the presence of such DNA/RNA is/are not required, nor is any ligand for such pathway. The plasmid can encode an antigen, epitope(s), or protein from a pathogen or a tumor.

[0131] Provided are immunostimulatory bacteria that comprise a plasmid encoding a combination of heterologous products, where: the genome of the immunostimulatory bacterium is modified by deletion or disruption of all or of a sufficient portion of a gene or genes, whereby the bacterium has attenuated recognition by TLR2, and optionally one or both of TLR4 and TLR5; one product is part of a cytosolic DNA/RNA sensor pathway that leads to expression of type I interferon (IFN); and a second product that is an antigen, an epitope or epitopes from is antigen, or is protein for immunization against the pathogen or tumor. In some embodiments, the genome of the bacterium is modified whereby the bacterium does not have curli fimbriae.

[0132] Also provided are immunostimulatory bacteria, comprising nucleic acid operatively linked to a prokaryotic promoter, particularly where the nucleic acid is encoded on plasmid, where: the nucleic acid, which is expressed in the bacteria under control of the prokaryotic promoter, encodes RNA that lacks sequences necessary for translation by a prokaryote, whereby the RNA is produced in the bacterium. Exemplary of such are embodiments where the encoded RNA lacks a Shine-Dalgarno sequence, and/or comprises an Internal Ribosome Entry Site (IRES). The nucleic acid also can encode a translational read through 2A peptide so that discrete products are produced upon expression of the nucleic acid when the nucleic acid encodes a polycistronic message.

[0133] Provided are immunostimulatory bacteria, comprising nucleic acid, such as on a plasmid, operatively linked to a prokaryotic promoter, where the nucleic acid comprises RNA that lacks sequences necessary for translation by a prokaryote. As a result the bacteria can transcribe, but not translate the encoded RNA. The bacteria can then be used as RNA delivery vehicles. As noted, this can be achieved where the encoded RNA lacks a Shine-Dalgarno sequence. For polycistronic nucleic acid, the nucleic acid can comprise a 2A peptide, such as one or more of T2A, P2A, E2A, or F2A.

[0134] Provided are immunostimulatory bacteria, where the nucleic acid encoding a therapeutic product is operatively linked to a prokaryotic promoter; the nucleic acid encodes RNA that lacks sequences necessary for translation by a prokaryote, whereby the RNA is produced in the bacterium; the RNA lacks a Shine-Dalgarno sequence, and comprises an Internal Ribosome Entry Site (IRES), and/or can also include a translational read through 2A peptide. In some embodiments, The nucleic acid encoding the therapeutic product(s) can be operably linked to nucleic acid encoding a secretion signal, whereby, when expressed, the therapeutic product(s) is/are secreted.

[0135] Bacterial promoters for expression of encoded therapeutic products include any recognized by the bacterial or bacteriophage RNA polymerase, such as a bacterial promoter or a bacteriophage promoter. Where the promoter is one only recognized by a bacteriophage RNA polymerase, the bacteria can encode the bacteriophage polymerase, such as a T7 RNA polymerase. Exemplary promoters are any comprising any of SEQ ID NOs: 393-396, respectively:

attatgtcttgacatgtagtgagtgggctggtataatgcagcaag,
or
ttatgcttgacgctgcgtaaggtttttgttataatacaccaag,
or
attatgtcttgacatgtagtgagtgggctggtaaatgcagcaag,
or
gatcccggagttcatgcgtgatgcaatgaaagtgccgttctactt
cggtgggacctcactgcttatcgttgttgtcgtgattatggactt
tatggctcaagtgcaaactctgatgatgtccagtcagtatgagtc
tgcattgaagaaggcgaacctgaaaggctacggccgttaattggt
cgcctgagaagttacggagagtaaaaatgaaagttcgtgcttccg
tcaagaaattatgccgtaactgcaaaatcgttaagcgtgatggtg
tcatccgtgtgatttgcagtgccgagccgaagcataaacagcgcc
aaggctgattttttcgcatatttttcttgcaaagttgggttgagc
tggctagattagccagccaatcttttgtatgtctgtacgtttcca
tttgagtatcctgaaaacgggcttttcagcatggtacgtacatat
taaatagtaggagtgcatagtggcccgtatagcaggcattaacat
tcctgatcagaaacacgccgtgatcgcgttaacttcgatctacgg
tgtcggcaagacccgttctaaagccatcctggctgcagcgggtat
cgctgaaaatgttaagatcctctagatttaagaaggagatataca
t
(Salmonella rpsm promoter).

[0136] The immunostimulatory bacteria include genome modifications, such as elimination of flagella and/or other modifications so that the bacteria do not infect epithelial cells, but still infect or accumulate in or preferentially infect (infect to a greater extent or amount than the unmodified bacteria, and infect other cells types to lesser extent or amount than the unmodified bacteria) phagocytic cells, such as tumor-resident myeloid cells in subjects with tumors, and tissue-resident myeloid cells, such at or near the site of vaccination when the bacteria are vaccines. Such bacteria include those that contain genome modifications so that, for bacteria that have flagella, the modifications render the bacterial flagellin deficient so that the bacteria lack flagella.

[0137] Immunostimulatory bacteria provided herein include those that comprise a plasmid encoding a therapeutic product, where infection of a macrophage by the bacterium converts a macrophage to an M1 or M1-like phenotype macrophage. The encoded therapeutic product can be a therapeutic product that is part of a cytosolic DNA/RNA sensor pathway that leads to expression of type I interferon (IFN), such as one that modified so that expression of the type I IFN is constitutive. The therapeutic product can be one that is a gain-of-function (GOF) variant of the therapeutic product that is part of the cytosolic DNA/RNA sensor pathway, wherein the variant GOF product does not require cytosolic nucleic acids, nucleotides, dinucleotides, or cyclic dinucleotides to result in expression of type I IFN. Exemplary of such products is a modified or variant STING protein. Infection by such bacteria can convert human M2 macrophages into M1-like type I IFN producing cells. Exemplary of such bacteria are those that lack flagella, where the wild-type bacterium has flagella, and are pagP⁻/msbB⁻. Thus, provided are methods for converting an M2 macrophage into one with an M1 or M1-like phenotype by introducing or infecting the M2 macrophage with a immunostimulatory bacterium that lacks flagella and has penta-acylated LPS, such as a bacterium that is msbB⁻/pagP⁻, and that encodes a be a therapeutic product that is part of a cytosolic DNA/RNA sensor pathway that leads to expression of type I interferon (IFN), such as one that modified so that expression of the type I IFN is constitutive, such as the variant or modified STING proteins as described herein, including those that result in constitutive type I IFN expression. Exemplary of such bacteria are those that are a Salmonella strain species or type.

[0138] The immunostimulatory bacteria can encode therapeutic products on the plasmid, such therapeutic products include an anti-cancer therapeutics, which include any product that is used for or in connection or conjunction with a cancer treatment. The therapeutic products also include products that are used for or in connection or conjunction with treatments for a pathogen, such as a viral, bacterial, yeast, or parasitic pathogen. The products can be an anti-viral therapeutics and/or an anti-pathogenic bacterial therapeutics. It is understood that some therapeutic products are used for treatment of a variety of indications; for example, an anti-cancer product can also be effective or used for treatment of viral infections. Anti-virals include vaccines, and therapeutic products that inhibit a viral enzyme or inhibit viral replication. Therapeutics include the anti-viral therapeutics, such as a viral antigen whose expression results in an immune-protective response against a virus, and antibodies that binds to and/or interact with a viral antigen, whereby a virus is inhibited or blocked, or anti-viral immunity results. Other therapeutics are anti-bacterial therapeutics, such as bacterial antigens whose expression results in an immune-protective response against the bacterial pathogen, and/or antibodies that bind to or interact with a bacterial antigen, whereby the pathogenic bacterium is inhibited or blocked, or anti-pathogenic bacterium immunity results. Antivirals encoded by the bacteria include anti-viral therapeutics for treating a virus or infectious agent that causes persistent infection. Exemplary of anti-viral therapeutics are viral antigens or epitopes of an antigen, such as, but not limited to, a viral surface protein, or a viral nucleocapsid protein, or a viral nonstructural protein, or a virus open reading frame protein, such as, for example, embodiments in which a therapeutic product is a viral surface antigen or portion thereof sufficient to produce an immune response in a host, embodiments in which the therapeutic product interferes with viral gene expression or replication.

[0139] The virus or other infectious agent or pathogen can be one that causes chronic infection, and/or latent infection, and/or slow infection. Exemplary of viral pathogens are a virus or infectious agent selected from among T-Cell leukemia viruses, Epstein-Barr virus, cytomegalovirus, herpesviruses, varicella zoster virus, measles virus, papovaviruses, prions, hepatitis virus type A, B, C, D and E, adenoviruses, parvoviruses, human immunodeficiency virus (HIV), coronaviruses, smallpox virus, poliovirus, influenza virus, rotavirus, yellow fever virus, mumps virus, rubella virus, and papillomaviruses, such as a HIV or hepatitis virus. Other infectious agents include prions and protozoans.

[0140] Therapeutic products encoded by the immunostimulatory bacteria include immunostimulatory proteins, such as the aforementioned Stimulator of Interferon Genes (STING) protein, a modified STING protein, a cytokine, a chemokine, or a co-stimulatory receptor or ligand. The immunostimulatory bacteria include those that comprise a genomic modification whereby the bacteria lack flagella, and/or are pagP⁻ or msbB⁻/pagP. The products include immunostimulatory proteins that confer or contribute to anti-tumor immunity in the tumor microenvironment is a cytokine or a chemokine.

[0141] The immunostimulatory bacterium include any described herein and that also comprise genomic modification whereby they do not express asparaginase or activate the synthesis of secreted asparaginase; and/or the genome of the immunostimulatory bacterium is modified by deletion or disruption of all or of a sufficient portion of the gene ansB encoding L-asparaginase II, whereby the bacterium is ansB⁻ and does not express active L-asparaginase II. Such bacteria can encode any therapeutic product of interest, including any provided or described herein, whereby the resulting bacterium is an anti-cancer therapeutic that colonizes tumors and/or the tumor microenvironment, whereby the ansB⁻ phenotype reduces or eliminates production of active asparaginase.

[0142] Provided herein are immunostimulatory bacteria, comprising nucleic acid operatively linked to a prokaryotic promoter, where: the nucleic acid comprises RNA that lacks sequences necessary for translation by a prokaryote, whereby the RNA is produced in the bacterium, but cannot be translated by the bacterium; the bacterium has genomic modifications whereby infection is restricted to myeloid cells; and the RNA encodes a therapeutic product or is a therapeutic product.

[0143] Provided herein is an RNA delivery system, comprising an immunostimulatory bacterium that primarily or solely infects myeloid cells and that comprises RNA encoded by the bacterium under control of a prokaryotic promoter, where: the RNA lacks regulatory sequences necessary for translation by the bacterium; and the RNA encodes a therapeutic product or is a therapeutic product. As discussed, the transcribed RNA lacks a Shine-Dalgarno sequence or include or lack other sequences so that it is not translated by bacterial ribosomes, but is translated by eukaryotic ribosomes in a host. The RNA can comprise a Kozak consensus sequence, such as, for example, where a Kozak consensus sequence is ACCAUGG (SEQ ID NO: 397). The immunostimulatory bacteria of includes those that lack flagella and are msbB⁻/pagP⁻. In the RNA delivery systems, the bacteria can contain a plasmid that encodes the therapeutic product or products. In some embodiments, the nucleic acid encoding the therapeutic product(s) is operatively linked to a prokaryotic promoter that is inducible or one that is constitutive. The encoding nucleic acid can comprise nucleic acid encoding an Internal Ribosome Entry Site (IRES) or other sequence so that the transcribed RNA is not translated by bacterial ribosomes but is translated by eukaryotic ribosomes. As a result the bacteria encode and produce RNA encoding any therapeutic protein, such as an antigen and other payload, but does not translate the RNA. The RNA is translated after administration of the bacteria to a host, such as a human, where, for example, the enter phagocytic cells, where the RNA can be translated.

[0144] Provided are immunostimulatory bacteria and RNA delivery system where the genome of the immunostimulatory bacterium is modified by deletion or disruption or other change of all or of a sufficient portion of the gene ansB, encoding L-asparaginase IL, whereby the bacterium is ansB and does not express active L-asparaginase II. The immunostimulatory bacteria and RNA delivery systems can further contain modification(s) of the genome, such as by deletion or disruption or mother change of all or of a sufficient portion of the gene csgD, whereby the bacterium is ansB⁻ and does not express active L-asparaginase II, and is csgD⁻ and does not activate the synthesis of curli fimbriae and/or the bacteria can include further modification(s) of the genome whereby biofilm formation is impaired. These bacteria and RNA delivery systems can further include genome modifications whereby the bacteria is flagellin⁻ and does not produce flagella, where the wild-type bacterium has flagella. Hence, for example, the immunostimulatory bacterium or RNA delivery system has genomes modifications, whereby the bacterium is csgD⁻/msbB⁻/pagP⁻ and the bacterium or RNA delivery system also can include genome modifications, whereby the bacterium lacks flagella. Other genome modifications can be included, whereby the bacterium lacks flagella, and is lppA⁻/lppB⁻, and optionally is csgD⁻. Any of the immunostimulatory bacteria and RNA systems described herein can be auxotrophic for a nutrient, such as purines, such as auxotrophy for adenosine and/or for all or any of adenosine, adenine, and ATP. Adenosine auxotrophy is advantageous for bacteria that accumulate in the tumor microenvironment or tumor-resident macrophage; adenosine accumulation occurs in the tumor microenvironment. The bacteria provided herein can include additional genome modifications, including those whereby the is purI⁻, including by complete deletion of the gene, and/or is pagP⁻ and/or is asd⁻ or thyA⁻ or both.

[0145] The immunostimulatory bacteria provided herein can be aspartate-semialdehyde dehydrogenase⁻ (asd⁻), where the bacterium is asd⁻ by virtue of disruption of or deletion or transposition or other modification of all or a portion of the endogenous gene encoding aspartate-semialdehyde dehydrogenase (asd), whereby endogenous asd is not expressed or functional enzyme is not produced, or is thyA⁻ by virtue of the disruption of or deletion of all or a portion of the endogenous gene or genes, whereby endogenous thymidylate synthase is not expressed or functional enzyme is not produced. Hence provided are immunostimulatory bacteria that are aspartate-semialdehyde dehydrogenase (asd⁻), where: the bacterium is asd⁻ by virtue of disruption of or deletion of all or a portion of the endogenous gene encoding aspartate-semialdehyde dehydrogenase (asd), whereby endogenous asd is not expressed or functional enzyme is not produced; and the bacterium is thyA⁻ by virtue of the disruption of or deletion of all or a portion of the endogenous gene or genes, whereby endogenous thymidylate synthase is not expressed or functional enzyme is not produced. The immunostimulatory bacteria can encodes aspartate-semialdehyde dehydrogenase (asd) on the plasmid under control of a bacterial promoter so that the asd can be produced in vivo. Exemplary of the immunostimulatory bacteria provided are those here the unmodified bacterium is a Salmonella bacterium.

[0146] The immunostimulatory bacterium of provided herein can be msbB⁻ by virtue of genome modifications, including, but not limited to, complete or partial deletion of the gene locus. Full deletion results in bacteria that grow better than those that retain part of the gene.

[0147] The bacteria provided herein are immunostimulatory bacteria that are asd⁻, purI⁻, msbB⁻, flagellin⁻ and pagP⁻; or that any immunostimulatory bacteria described above or herein that are asd⁻, csgD⁻, purI⁻, msbB⁻, flagellin⁻ and pagP⁻; or thyA⁻, csgD⁻, purI⁻, msbB⁻, flagellin⁻ and pagP⁻; or ansB⁻, asd⁻, csgD⁻, purI⁻, msbB⁻, flagellin⁻ and pagP⁻; or ansB⁻, thyA⁻, csgD⁻, purI⁻, msbB⁻, flagellin⁻ and pagP⁻, or is ansB⁻, thyA⁻, csgD⁻, purI⁻, msbB⁻, flagellin⁻ and pagP⁻.

[0148] The immunostimulatory bacteria encode therapeutic products, such as but not limited to, anti-cancer therapeutics and/or therapeutics for treating diseases, disorders, and conditions caused by pathogens or other diseases, disorders, and conditions. Exemplary encoded products include, but are not limited to combinations of products, such as a modified STING and IL-15 or IL-15/IL-15R alpha chain complex, where the STING constitutively induces type I IFN in the absence of cGAS and/or any STING ligands.

[0149] Provided are the immunostimulatory bacteria as described herein that encode a therapeutic product that is an anti-viral product, such as, for example, a viral antigen and/or an anti-viral antibody. Viruses include, for example, viruses that cause chronic infections or latent infections, such as, but not limited to, a hepatitis virus, a herpes virus, a varicella zoster virus, a poxvirus, a measles virus, and a retrovirus.

[0150] In the immunostimulatory bacterium the copy number of the plasmids is from low to high. In some embodiments, the copy number is from low to medium, such as where number of copies of the plasmid is less than 150. In other embodiments the copy number is from 150 or is greater than 150. Hence in embodiments, the number of copies of the plasmid is 150 copies or fewer, or is less than or equal to 150. In other embodiments, the plasmid is present in low copy number, and low copy number is less than 25 or less than 20 or less than about 25 or less than about 20 copies, typically less than 25.

[0151] The encoded therapeutic products include, proteins and also nucleic acids, such as RNA products, antigens, antibodies. The plasmid can encode two or more products. Exemplary products are any that are used in the treatment of cancer. Also included are produces used as anti-viral treatment(s). For example, the bacteria can encode two or more products selected from among a cytokine, a protein that constitutively induces a type I IFN, and a co-stimulatory receptor or molecule. The co-stimulatory molecule can be modified so that it lacks a cytoplasmic domain. The products can have complementary activities; in some embodiments the activities are synergistic. The nucleic acid encoding one or more of the therapeutic product or products comprises nucleic acid can encode a signal for secretion of the therapeutic product(s) from a cell comprising the bacterium. The nucleic acid encoding the product on the plasmid can be operatively linked to regulatory sequences recognized by a eukaryotic host. In embodiments, in which the immunostimulatory bacterium encodes two or more products, expression of each product can be under control of a separate promoter, or expression of all two or more can be under control of a single promoter, such as where nucleic acid encoding each product is separated by nucleic acid encoding a 2A peptide to effect separate translation of each encoded therapeutic product. Exemplary 2A peptides, include T2A, F2A, E2A, or P2A peptide, which effect separate expression of therapeutic products expressed under control of a single promoter. Eukaryotic regulatory signals can control expression of the produce or products. Eukaryotic promoters include RNA polymerase II promoters and RNA polymerase III promoters. Eukaryotic RNA polymerase II promoters include viral promoters from viruses that infect eukaryotes, and mammalian RNA polymerase II promoters. Exemplary promoters include, but are not limited to, viral promoters, such as a cytomegalovirus (CMV) promoter, an SV40 promoter, an Epstein Barr virus (EBV) promoter, a herpes virus promoter, and an adenovirus promoter; an elongation factor-1 (EF-1) alpha promoter, or an MND promoter, or a UBC promoter, or a PGK promoter, or a CAG promoter, such as an EF-1 alpha, an adenovirus 2 or 5 late, a CMV, an SV40, an MND, a PGK, an EIF4A1, a CAG, or a CD68 promoter. Viral promoters include those that are late promoters.

[0152] The immunostimulatory bacteria include those where the plasmid comprises regulatory sequences that comprise a terminator and/or promoter(s) selected from among SV40, hGH, BGH, MND, chicken beta-globulin, and rbGlob (rabbit globulin) genes, to control expression of the therapeutic product(s). The encoded therapeutic product(s) can be operatively linked to a signal sequence for secretion from a cell containing the plasmid; or in some embodiments can be designed or modified to be expressed on the surface of the cell in which they are produced. The plasmid that encodes the therapeutic product(s) can comprises a nucleic acid construct that includes an enhancer, a promoter, the open reading frame encoding the therapeutic product or heterologous protein, and a polyA tail. Exemplary of the plasmids in the bacteria are those where the plasmid comprises a construct that includes an enhancer, a promoter, an IRES, the open reading frame encoding the therapeutic product or heterologous protein, and a polyA tail, and those where the plasmid comprises a construct that includes an enhancer, a promoter, an IRES, a localization sequence, the open reading frame encoding the therapeutic product or heterologous protein, and a polyA tail. The constructs can include posttranscriptional regulatory elements, such as a Woodchuck Hepatitis Virus (WHP) Posttranscriptional Regulatory Element (WPRE), or a Hepatitis B virus Posttranscriptional Regulatory Element (HPRE).

[0153] The bacteria provided herein contain plasmids that encode a therapeutic product that is part of a cytosolic DNA/RNA sensor pathway that leads to expression of type I interferon (IFN), or a variant of the therapeutic product. These products can be modified to have increased or constitutive activity for expression of type I IFN. These products in unmodified form sense or interact directly or indirectly with cytosolic nucleic acids, nucleotides, dinucleotides, or cyclic dinucleotides, to induce expression of type I IFN, and the variant or modified protein induces expression of type I IFN in the absence of the sensing or interacting with the cytosolic nucleic acids, nucleotides, dinucleotides, or cyclic dinucleotides so that in the therapeutic product is a variant that, when expressed in a subject, leads to constitutive expression of type I IFN. Mutations in the variant proteins include those that result in a gain-of-function so that the variant that does not require cytosolic nucleic acids, nucleotides, dinucleotides, or cyclic dinucleotides, or ligands, to result in expression of type I IFN. These products that are part of a cytosolic DNA/RNA sensor pathway that leads to expression of type I interferon (IFN) include, but are not limited to, STING, RIG-I, MDA-5, IRF-3, IRF-5, IRF-7, IRF-8, TRIM56, RIP1, Sec5, TRAF3, TRAF2, TRAF6, STAT1, LGP2, DDX3, DHX9, DDX1, DDX9, DDX21, DHX15, DHX33, DHX36, DDX60, and SNRNP200, such as STING, RIG-I, IRF-3, IRF-5, IRF-8, or MDA5, particularly variants of these proteins that have increased activity, or that results in constitutive expression of type I interferon (IFN). Mutations include those that, in humans, promotes or causes interferonopathies. Other mutations in these proteins include mutations that eliminate a phosphorylation site in the protein to thereby reduce nuclear factor kappa-light-chain-enhancer of activated B cell (NF-κB) signaling, and combinations of mutations. Provided are immunostimulatory bacteria, where the therapeutic product is a variant thereof that has increased activity or constitutive activity; and the therapeutic product is STING, RIG-I, IRF-3, IRF-5, IRF-8, or MDA5, such as, for example, where the therapeutic product is a variant of STING, RIG-I, IRF-3, IRF-5, IRF-8, or MDA5 that comprises a gain-of-function mutation resulting in increased or constitutive expression of type I IFN, and optionally mutations or replacements of the C-terminal tail (CTT) resulting in decreased NF-κB signaling activity, such as where the therapeutic product is a variant of STING, RIG-I, IRF-3, IRF-5, IRF-8, or MDA5 in which one or more serine (S) or threonine (T) residue(s) that is/are phosphorylated as a consequence of viral infection, is/are replaced with an aspartic acid (D), whereby the resulting variant is a phosphomimetic that constitutively induces type I IFN.

[0154] The therapeutic product is IRF-3 that has one or more replacement(s) at residues at positions 396, 398, 402, 404 and 405, with reference to SEQ ID NO:312; and the residues are replaced with aspartic acid residues, such as an IRF-3 that comprises the replacement S396D with reference to SEQ ID NO:312, such as, for example, where IRF-3 comprises the replacements S396D/S398D/S402D/T404D/S405D with reference to SEQ ID NO:312. Other examples, include where the therapeutic product that senses cytosolic DNA/RNA is a variant STING, MDA5, RIG-I or IRF-3; and unmodified STING has the sequence set forth in any of SEQ ID NOs: 305-309, unmodified MDA5 has the sequence set forth in SEQ ID NO: 310, unmodified RIG-I has the sequence set forth in SEQ ID NO: 311, and unmodified IRF-3 has the sequence set forth in SEQ ID NO: 312. In other examples, the therapeutic product is selected from among STING, MDA5, IRF-3, and RIG-I, and comprises a gain-of-function mutation(s) that renders the STING, MDA5, IRF-3, IRF-5, IRF-8, or RIG-I constitutively active, whereby expression of type I IFN is constitutive. Mutations can be selected as follows:
[0155] a) in STING, with reference to SEQ ID NOs: 305-309, one or more selected from among: S102P, V147L, V147M, N154S, V155M, G166E, C206Y, G207E, S102P/F279L, F279L, R281Q, R284G, R284S, R284M, R284K, R284T, R197A, D205A, R310A, R293A, T294A, E296A, R197A/D205A, S272A/Q273A, R310A/E316A, E316A, E316N, E316Q, S272A, R293A/T294A/E296A, D231A, R232A, K236A, Q273A, S358A/E360A/S366A, D231A/R232A/K236A/R238A, S358A, E360A, S366A, R238A, R375A, N154S/R284G, and S324A/S326A;
[0156] b) in MDA5, with reference to SEQ ID NO:310, one or more of: T331I, T331R, A489T, R822Q, G821S, A946T, R337G, D393V, G495R, R720Q, R779H, R779C, L372F, and A452T;
[0157] c) in RIG-I, with reference to SEQ ID NO:311, one or both of E373A and C268F; and
[0158] d) in IRF-3, with reference to SEQ ID NO:312, S396D; and
[0159] e) conservative replacements of any of the above. For example, where the therapeutic product is a variant STING protein that contains one or more amino replacement(s) selected, with reference to SEQ ID NOs: 305-309, from among: S102P, V147L, V147M, N154S, V155M, G166E, C206Y, G207E, S102P/F279L, F279L, R281Q, R284G, R284S, R284M, R284K, R284T, R197A, D205A, R310A, R293A, T294A, E296A, R197A/D205A, S272A/Q273A, R310A/E316A, E316A, E316N, E316Q, S272A, R293A/T294A/E296A, D231A, R232A, K236A, Q273A, S358A/E360A/S366A, D231A/R232A/K236A/R238A, S358A, E360A, S366A, R238A, R375A, N154S/R284G, and S324A/S326A, and conservative replacements thereof.

[0160] Encoded therapeutic products, include, for example, antibodies, of any form known to those of skill in the art, and includes multi-specific, such as bi-specific antibodies, such as, for example, where the bi-specific antibody is a bi-specific T-cell engager, such as where a plasmid in the bacterium encodes a bi-specific T-cell engager antibody that binds DLL3 and CD3, such as a bi-specific T-cell engager antibody that comprises a heavy chain and light chain of an anti-DLL3 antibody and of an anti-CD3 antibody, such has those encoded in the constructs designated SC16.15, SC16.34, and SC16.56, which encode variable heavy and variable light chains of antibodies that bind each of DLL3 and CD3, and whose sequences are set forth in SEQ ID NOs.485-491, or humanized variants thereof, and variants that have at least 95% or 98% sequence identity thereto. For example, the encoded bi-specific T-cell engager antibody comprises combinations of a)-f), whereby the resulting construct can bind to each of DLL3 and CD3:
[0161] a) a light chain that comprises amino acid residues 154-260 of SEQ ID NO: 487, or a humanized variant thereof, or a variant having at least 95% sequence identity thereto; and
[0162] b) a heavy chain that comprises the sequence of amino acid residues set forth as amino acid residues 22-138 of SEQ ID NO: 487, or a humanized variant thereof, or a variant having at least 95% sequence identity thereto; and
[0163] c) a light chain that comprises a sequence of amino acid residues set forth as amino acid residues 155-261 of SEQ ID NO: 489, or a humanized variant thereof, or a variant having at least 95% sequence identity thereto; and
[0164] d) a heavy chain that comprises a sequence of amino acid residues set forth as amino acid residues 22-139 of SEQ ID NO: 489, or a humanized variant thereof, or a variant having at least 95% sequence identity thereto; and
[0165] e) a heavy and light chain, wherein:
   [0166] the light chain comprises a sequence of amino acid residues set forth as amino acid residues 155-261 of SEQ ID NO: 485, or a humanized variant thereof, or a variant having at least 95% sequence identity thereto; and
   [0167] the heavy chain comprises a sequence of amino acid residues set forth as amino acid residues 22-139 of SEQ ID NO: 485, or a humanized variant thereof, or a variant having at least 95% sequence identity thereto; and
[0168] f) a heavy and light chain of an anti-CD3 antibody, wherein:
   [0169] the light chain of the anti-CD3 antibody comprises a sequence of amino acid residues set forth as amino acid residues 398-504 of SEQ ID NO: 485, or a humanized variant thereof, or a variant having at least 95% sequence identity thereto, or a humanized variant thereof, or a variant having at least 95% sequence identity thereto; and
   [0170] the heavy chain of the anti-CD3 antibody comprises a sequence of amino acid residues set forth as amino acid residues 267-382 of SEQ ID NO: 485, or a humanized variant thereof, or a variant having at least 95% sequence identity thereto. The encoded bi-specific T-cell engager antibody construct can comprise a leader sequence, such as, for example, an IgGK leader sequence. The bispecific antibody also can comprise a Gly-Ser linker linking one or more light and heavy chains; and also can comprise a linker, such as a Gly-Ser linker, linking the portions that bind different targets, such as a Gly-Ser linker linking the anti-DLL3 and anti-CD3 portions of an exemplary bi-specific T-cell engager antibody. An exemplary linker comprises the sequence of amino acids set forth as residues 383-397 of SEQ ID NO: 485 and variants thereof. The bi-specific T-cell engager antibody can comprise a flag tag, such as, for example, a flag tag that comprises the sequence of amino acids set forth as residues 505-512 of SEQ ID NO: 485. Exemplary of constructs that encode a bi-specific T-cell engager antibody is a nucleic acid construct encoding a leader sequence, the heavy and light chain of an anti-DLL antibody, and the heavy and light chain of an anti-CD3 antibody, and optionally one or more peptide linkers, and optionally a flag tag, such as, for example, where the encoded bi-specific T-cell engager antibody construct comprises the sequence of amino acid residues set forth in any of SEQ ID NOs: 485-491, or a humanized variant thereof, or a variant having at least 95% sequence identity thereto, and sequences having at least 95% or 98% sequence identity thereto, and retaining the bi-specific binding.

[0171] Another example of a therapeutic product that can be encoded in the plasmid of the immunostimulatory bacteria provided is/are tumor-associated antigen(s). These plasmids can encode another therapeutic product, such as a protein that is part of a cytosolic DNA/RNA sensor pathway that leads to expression of type I interferon (IFN) part of a cytosolic DNA/RNA sensor pathway that leads to expression of type I interferon (IFN), such as, for example, a modified STING protein that constitutively induces type I interferon. Exemplary of such STING proteins is a modified STING protein that comprises the replacements corresponding to N154S, or R284G, or N154S/R284G. These include human STING, non-human STING that has a lower NF-κB signaling activity compared to human STING, and the chimeric STING proteins that comprise a CTT from a non-human STING with lower NF-κB activity than human STING. The plasmids also can encode a cytokine, that, for example, has anti-tumor or anti-viral activity, such as IL-15 or an IL-15/IL-15R alpha chain complex. The plasmid can encode the combination of a modified STING, IL-15/IL-15R alpha chain complex, or the modified STING, IL-15, and a tumor-associated antigen and/or a bi-specific T-cell engager antibody. Other encoded therapeutic products include an immunostimulatory protein(s) that confers or contributes to an anti-tumor immune response in the tumor microenvironment that is selected from among one or more of: IL-2, IL-7, IL-12p70 (IL-12p40+IL-12p35), IL-15, IL-2 that has attenuated binding to IL-2Ra, IL-15/IL-15R alpha chain complex (IL-15Rα-IL-15sc), IL-18, IL-21, IL-23, IL-36γ, IL-2 that is modified so that it does not bind to IL-2Ra, CXCL9, CXCL10, CXCL11, interferon-α, interferon-ρ, interferon-γ, CCL3, CCL4, CCL5, proteins that are involved in or that effect or potentiate recruitment and/or persistence of T cells, CD40, CD40 ligand (CD40L), CD28, OX40, OX40 ligand (OX40L), 4-1BB, 4-1BB ligand (4-1BBL), members of the B7-CD28 family, CD47 antagonists, an anti-IL-6 antibody or IL-6 binding decoy receptor, TGF-beta polypeptide antagonists, and members of the tumor necrosis factor receptor (TNFR) superfamily. Other immunostimulatory proteins that can be encoded are co-stimulatory molecules selected from among CD40, CD40 ligand (CD40L), CD28, OX40, OX40 ligand (OX40L), 4-1BB, and a 4-1BB ligand (4-1BBL) that optionally is truncated and lacking a cytoplasmic domain for expression on an antigen-presenting cell (APC); and where the truncated gene product is capable of constitutive immunostimulatory signaling to a T-cell through co-stimulatory receptor engagement and is unable to counter-regulatory signal to the antigen-presenting cell (APC) due to a deleted cytoplasmic domain. Other immunostimulatory proteins that confer or contribute to an anti-tumor immune response in the tumor microenvironment is an immunostimulatory protein that confers or contributes to an anti-tumor immune response in the tumor microenvironment is a cytokine, a chemokine, and/or a co-stimulatory molecule, such as cytoplasmic domain-deleted form thereof, such as one or more of 4-1BBL, CD80, CD86, CD27L, CD24L, B7RP1, and OX40L. Other therapeutic products include, for example, TGF-beta polypeptide antagonists. Other therapeutic products are antibodies or antibody or antigen-binding fragments or forms thereof, such as, but not limited to, a Fab, Fab′, F(ab′)₂, single-chain Fv (scFv), Fv, dsFv, nanobody, diabody fragment, and a single-chain antibody. The antibody or antigen-binding fragment thereof can be humanized or human. Exemplary of antibody and antigen binding fragments is an antagonist of PD-1, PD-L1, CTLA-4, VEGF, VEGFR2, CD24, or IL-6.

[0172] The immunostimulatory bacterium can contain a plasmid that encodes two or more therapeutic products selected from among: a) an immunostimulatory protein that confers or contributes to an anti-tumor immune response in the tumor microenvironment; b) one or more of a protein that is part of a cytosolic DNA/RNA sensor pathway that leads to expression of type I interferon (IFN), or a variant thereof that has increased activity to increase expression of type I IFN, or a variant thereof that results in constitutive expression of a type I IFN; and c) an anti-cancer antibody or antigen-binding portion thereof. In some embodiments, the immunostimulatory protein is a co-stimulatory molecule that lacks a cytoplasmic domain or a sufficient portion thereof, for expression on an antigen-presenting cell (APC), whereby the truncated co-stimulatory molecule is capable of constitutive immunostimulatory signaling to a T-cell through co-stimulatory receptor engagement and is unable to counter-regulatory signal to the antigen presenting cell (APC). In some embodiments, the immunostimulatory bacteria comprise plasmid that encodes two or more therapeutic products under control of a single promoter, where the therapeutic products are selected from among: a) an immunostimulatory protein that confers or contributes to an anti-tumor immune response in the tumor microenvironment; b) one or more of a protein that is part of a cytosolic DNA/RNA sensor pathway that leads to expression of type I interferon (IFN), or a variant thereof that has increased activity to increase expression of type I IFN, or a variant thereof that results in constitutive expression of a type I IFN; and c) an anti-cancer antibody or antigen-binding portion thereof, and where the encoding nucleic acids are separated by an IRES sequence or 2A peptides, and each nucleic acid encoding each product is optionally operatively linked to nucleic acid encoding a signal sequence, whereby, upon translation of the encoded mRNA, each product is separately expressed and secreted from a cell comprising the bacterium and/or plasmid. Where the immunostimulatory protein is a co-stimulatory molecule, it can lack a cytoplasmic domain or a sufficient portion thereof, for expression on an antigen-presenting cell (APC), whereby the truncated co-stimulatory molecule is capable of constitutive immunostimulatory signaling to a T-cell through co-stimulatory receptor engagement and is unable to counter-regulatory signal to the antigen presenting cell (APC). For example, the immunostimulatory bacterium provided herein, wherein the plasmid encodes at least two therapeutic products selected from among a cytokine, a protein that constitutively induces a type I IFN, a co-stimulatory molecule, and an anti-cancer antibody or antigen-binding portion thereof. The immunostimulatory bacteria can comprise a plasmid that encodes at least two therapeutic products selected, for example, from among two or more or all of a cytokine, a protein that constitutively induces a type I IFN, a co-stimulatory molecule, and an anti-cancer antibody or antigen-binding portion thereof, and also encodes an antigen or an antigenic protein, such as one that results in an immune response against a tumor and/or a pathogen. The antigen or antigenic protein can be, for example, a tumor-associated antigen. Examples of tumor-associated antigens and proteins include, but are not limited to, an oncofetal antigen, an oncoviral antigen, and overexpressed/accumulated antigen, a cancer-Testis antigen, a linear restricted antigen, a mutated antigen, a post-translationally altered antigen, or an idiotypic antigen. Exemplary of such antigens and proteins are the following:

| Category of Tumor- | |
|---|---|
| Associated | |
| Antigen (TAA) | Name/Family Name of TAA |
| Oncofetal | Carcinoembryonic antigen (CEA) |
| | Immature laminin receptor |
| | Tumor-associated glycoprotein 72 (TAG-72) |
| Oncoviral | HPV E6, HPV E7 |
| Overexpressed/ | BING-4 |
| Accumulated | Epidermal Growth Factor Receptor (EGFR) |
| | Wilms' Tumor Protein |
| | Calcium-activated chloride channel 2 |
| | Cyclin-B1 |
| | 9D7 |
| | Delta-like ligand 3 (DLL3) |
| | Epithelial cell adhesion molecule (EpCAM) |
| | Ephrin type-A receptor 3 (EphA3) |
| | Human epidermal growth factor receptor 2 |
| | (HER2/Neu) |
| | Telomerase |
| | Mesothelin |
| | Stomach-cancer-associated protein tyrosine |
| | phosphatase 1 (SAP-1) |
| | Survivin |
| Cancer-Testis | BAGE (B melanoma antigen) family |
| | CAGE family |
| | GAGE family |
| | MAGE (melanoma antigen) family |
| | SAGE (sarcoma antigen) family |
| | PAGE family |
| | XAGE family |
| | CT9, CT10 |
| | New York esophageal squamous cell |
| | carcinoma 1 (NY-ESO-1), LAGE-1 |
| | Preferentially expressed antigen in |
| | melanoma (PRAME) |
| | synovial sarcoma/X breakpoint 2 (SSX-2) |
| Lineage-Restricted | Melanoma antigen recognized by T-cells 1 |
| | (Melan-A/MART-1) |
| | gp100/Pmel17 |
| | Tyrosinase |
| | Tyrosinase related protein (TRP)-1, TRP-2 |
| | P. polypeptide |
| | Melanocortin 1 receptor (MC1R) |
| | Prostate-specific antigen (PSA) |
| Mutated | β-catenin |
| | BRCA1, BRCA2 |
| | Cyclin dependent kinase 4 (CDK4) |
| | Chronic Myelogenous Leukemia Tumor |
| | Antigen 66 (CML66) |
| | Fibronectin |
| | Melanoma antigen recognized by T-cells 2 |
| | (MART-2) |
| | p53 |
| | Ras |
| | TGF-β receptor type II |
| | (TGF-βRII) |
| Post-Translationally | Mucin 1, Cell Surface Associated (MUC1) |
| Altered | |
| Idiotypic | Immunoglobulin (Ig), T-cell Receptor (TCR) |

[0173] In some embodiments, the encoded payloads, such as the therapeutic proteins, are expressed under control of a eukaryotic promoter. In other embodiments, described herein, the encoded payloads, such as where the immunostimulatory bacterium is an RNA delivery vehicle, the payloads are expressed under control of a prokaryotic promoter recognized by the bacterium.

[0174] In all embodiments, the immunostimulatory bacteria can comprise genome modifications whereby the bacterium is flagellin⁻, asd⁻, msbB⁻, pagP⁻, and csgD⁻; or is ansB⁻, asd⁻, csgD⁻, purI⁻, msbB⁻, flagellin⁻, and pagP⁻; or is thyA⁻, asd⁻, csgD⁻, purI⁻, msbB⁻, flagellin⁻, and pagP⁻; or is thyA⁻, csgD⁻, purI⁻, msbB⁻, flagellin⁻, and pagP⁻; or other combinations of modifications as described herein. Included are modifications, such genome modifications of an immunostimulatory bacterium to render it less inflammatory upon administration, than wild-type. Combinations of modifications include those that render the bacterium msbB⁻/pagP⁻, and lacking flagella, where the wild type bacterium has flagella.

[0175] The immunostimulatory bacteria provided herein can be an anti-cancer therapeutic. The immunostimulatory bacterium can be a vaccine for treating or preventing or reducing the risk of a cancer or infection from a pathogen. In such embodiments, the encoded payloads can be expressed under control of a prokaryotic promoter; and the nucleic acid encoding the payloads comprise translational regulatory signals that are recognized by eukaryotic ribosomes, and not by bacterial ribosomes. As a result, the encoded products and constructs are transcribed by the bacteria but are not translated by the bacteria; they are translated when administered to a host and when in a host cell, such as a phagocytic cell. The immunostimulatory bacteria can encode an antigen or protein or epitope(s) thereof from a pathogen. Exemplary pathogens include, but are not limited to, pathogens that cause chronic viral infections, such as infections by hepatitis viruses, herpes viruses, varicella zoster virus (VZV), Epstein-Barr virus, human immunodeficiency virus (HIV), human T-cell leukemia virus (HTLV), Respiratory Syncytial Virus (RSV), and measles virus; or is a virus or other pathogen chronically infect subjects; and pathogens that cause acute infections, such as initial infections with chronic influenza and coronaviruses, such as Severe Acute Respiratory Syndrome coronavirus (SARS-CoV), Middle East Respiratory Syndrome coronavirus (MERS-CoV), and Severe Acute Respiratory Syndrome coronavirus 2 (SARS-CoV-2, which causes COVID-19).

[0176] In some embodiments, the plasmid encodes an antigen from a pathogen or an epitope or combination of epitopes thereof, such as an antigen from an essential viral protein, such as, for example, in the case of a coronavirus, an antigen from the Nucleocapsid, M and/or S proteins, which can result in neutralizing antibodies, and the enhancement of long-lived circulating and tissue-resident CD8+ T-cells. Provided are immunostimulatory bacteria where nucleic acid encoding the antigen, epitope, or antigenic protein is operatively linked to a prokaryotic promoter recognized by the bacterium; and the encoding sequence includes regulatory sequences for translation that are recognized by eukaryotic ribosomes, whereby the bacterium cannot translate the encoded RNA, or the encoding sequence does not include a Shine Dalgarno sequence that is recognized by the bacterial ribosomes so that the encoded mRNA is not translated; and the mRNA is delivered to the eukaryotic host cell into which the bacterium is delivered.

[0177] Any of the immunostimulatory bacteria provided herein can comprise a plasmid that encodes two or more therapeutic products under control of a single promoter, where expression of the nucleic acid encoding at least two or all of the products is under control of a single promoter, and the nucleic acid encoding each product is separated by nucleic acid resulting in separate translated products, such as nucleic acid encoding 2A polypeptides, whereby, upon translation, each product is separately expressed.

[0178] In all of the immunostimulatory bacteria provided herein, the nucleic acid encoding one or more of the therapeutic products is operatively linked to nucleic acid encoding a sequence that directs secretion of the expressed product(s).

[0179] The therapeutic products include, co-stimulatory molecule, particularly one with a cytoplasmic domain deletion for expression on an antigen-presenting cell (APC), whereby the resulting truncated gene product is capable of constitutive immunostimulatory signaling to a T-cell through co-stimulatory receptor engagement, and is unable to counter-regulatory signal to the APC due to the cytoplasmic domain deletion. Exemplary of such co-stimulatory molecules is one or more of 4-1BBL, CD80, CD86, CD27L, B7RP1, CD24L, or OX40L, particularly with the cytoplasmic domain deletion.

[0180] The immunostimulatory bacteria can encode a plurality of products. In some embodiments, at least one product is selected from a) and at least one is selected from b), wherein: a) is IL-2, IL-7, IL-12p70 (IL-12p40+IL-12p35), IL-15, IL-23, IL-36 gamma, IL-2 that has attenuated binding to IL-2Ra, IL-15/IL-15R alpha chain complex (IL-15Rα-IL-15sc), IL-18, IL-2 that is modified so that it does not bind to IL-2Ra, CXCL9, CXCL10, CXCL11, interferon-α, interferon-β, CCL3, CCL4, CCL5, proteins that are involved in or that effect or potentiate recruitment and/or persistence of T cells, CD40, CD40 Ligand (CD40L), OX40, OX40 Ligand (OX40L), 4-1BB, 4-1BB Ligand (4-1BBL), members of the B7-CD28 family, TGF-beta polypeptide antagonists, or members of the tumor necrosis factor receptor (TNFR) superfamily; and b) is STING, RIG-I, MDA-5, IRF-3, IRF-5, IRF-7, IRF-8, TRIM56, RIP1, Sec5, TRAF3, TRAF2, TRAF6, STAT1, LGP2, DDX3, DHX9, DDX1, DDX9, DDX21, DHX15, DHX33, DHX36, DDX60, or SNRNP200.

[0181] Additional therapeutic products include, for example, one or more of a TGF-beta inhibitory antibody, a TGF-beta binding decoy receptor, an anti-IL-6 antibody, and an IL-6 binding decoy receptor. The immunostimulatory bacteria can encode one or more of the following combinations of therapeutic products:
[0182] IL-2 and IL-12p70;
[0183] IL-2 and IL-21;
[0184] IL-2, IL-12p70, and a STING GOF variant;
[0185] IL-2, IL-21, and a STING GOF variant;
[0186] IL-2, IL-12p70, a STING GOF variant, and 4-1BBL (including 4-1BBLΔcyt), where Δcyt is a deleted cytoplasmic domain;
[0187] IL-2, IL-21, a STING GOF variant, and 4-1BBL (including 4-1BBLΔcyt);
[0188] IL-15/IL-15Rα, and a STING GOF variant;
[0189] IL-15/IL-15Rα, a STING GOF variant, and 4-1BBL (including 4-1BBLΔcyt);
[0190] IL-15/IL-15Rα and IL-12p70;
[0191] IL-15/IL-15Rα and IL-21;
[0192] IL-15/IL-15Rα, IL-12p70, and a STING GOF variant;
[0193] IL-15/IL-15Rα, IL-21, and a STING GOF variant;
[0194] IL-15/IL-15Rα, IL-12p70, a STING GOF variant, and 4-1BBL (including 4-1BBLΔcyt);
[0195] IL-15/IL-15Rα, IL-21, a STING GOF variant, and 4-1BBL (including 4-1BBLΔcyt);
[0196] IL-12p70 and IL-21;
[0197] IL-12p70, IL-21, and a STING GOF variant;
[0198] IL-12p70, IL-21, a STING GOF variant, and 4-1BBL (including 4-1BBLΔcyt);
[0199] IL-12p70 and a STING GOF variant;
[0200] IL-12p70, a STING GOF variant, and 4-1BBL (including 4-1BBLΔcyt);
[0201] IL-12p70 and IL-18;
[0202] IL-12p70, IL-18, and a STING GOF variant;
[0203] IL-12p70, IL-18, a STING GOF variant, and 4-1BBL (including 4-1BBLΔcyt);
[0204] a TGF-β decoy receptor, IL-2, and IL-12p70;
[0205] a TGF-β decoy receptor, IL-2, and IL-21;
[0206] a TGF-β decoy receptor, IL-2, IL-12p70, and a STING GOF variant;
[0207] a TGF-β decoy receptor, IL-2, IL-21, and a STING GOF variant;
[0208] a TGF-β decoy receptor, IL-2, IL-12p70, a STING GOF variant, and 4-1BBL (including 4-1BBLΔcyt);
[0209] a TGF-β decoy receptor, IL-2, IL-21, a STING GOF variant, and 4-1BBL (including 4-1BBLΔcyt);
[0210] a TGF-β decoy receptor, IL-15/IL-15Rα, and a STING GOF variant;
[0211] a TGF-β decoy receptor, IL-15/IL-15Rα, a STING GOF variant, and 4-1BBL (including 4-1BBLΔcyt);
[0212] a TGF-β decoy receptor, IL-15/IL-15Rα, and IL-12p70;
[0213] a TGF-β decoy receptor, IL-15/IL-15Rα, and IL-21;
[0214] a TGF-β decoy receptor, IL-15/IL-15Rα, IL-12p70, and a STING GOF variant;
[0215] a TGF-β decoy receptor, IL-15/IL-15Rα, IL-21, and a STING GOF variant;
[0216] a TGF-β decoy receptor, IL-15/IL-15Rα, IL-12p70, a STING GOF variant, and 4-1BBL (including 4-1BBLΔcyt);
[0217] a TGF-β decoy receptor, IL-15/IL-15Rα, IL-21, a STING GOF variant, and 4-1BBL (including 4-1BBLΔcyt);
[0218] a TGF-β decoy receptor, IL-12p70, and IL-21;
[0219] a TGF-β decoy receptor, IL-12p70, IL-21, and a STING GOF variant;
[0220] a TGF-β decoy receptor, IL-12p70, IL-21, a STING GOF variant, and 4-1BBL (including 4-1BBLΔcyt);
[0221] a TGF-β decoy receptor and IL-12p70;
[0222] a TGF-β decoy receptor, IL-12p70, and a STING GOF variant;
[0223] a TGF-β decoy receptor, IL-12p70, a STING GOF variant, and 4-1BBL (including 4-1BBLΔcyt);
[0224] a TGF-β decoy receptor, IL-12p70, and IL-18;
[0225] a TGF-β decoy receptor, IL-12p70, IL-18, and a STING GOF variant;
[0226] a TGF-β decoy receptor, IL-12p70, IL-18, a STING GOF variant, and 4-1BBL (including 4-1BBLΔcyt);
[0227] a TGF-β decoy receptor and a STING GOF variant;
[0228] an anti-CTLA-4 antibody, IL-2, and IL-12p70;
[0229] an anti-CTLA-4 antibody, IL-2, and IL-21;
[0230] an anti-CTLA-4 antibody, IL-2, IL-12p70, and a STING GOF variant;
[0231] an anti-CTLA-4 antibody, IL-2, IL-21, and a STING GOF variant;
[0232] an anti-CTLA-4 antibody, IL-2, IL-12p70, a STING GOF variant, and 4-1BBL (including 4-1BBLΔcyt);
[0233] an anti-CTLA-4 antibody, IL-2, IL-21, a STING GOF variant, and 4-1BBL (including 4-1BBLΔcyt);
[0234] an anti-CTLA-4 antibody, IL-15/IL-15Rα, and a STING GOF variant;
[0235] an anti-CTLA-4 antibody, IL-15/IL-15Rα, a STING GOF variant, and 4-1BBL (including 4-1BBLΔcyt);
[0236] an anti-CTLA-4 antibody, IL-15/IL-15Rα, and IL-12p70;
[0237] an anti-CTLA-4 antibody, IL-15/IL-15Rα, and IL-21;
[0238] an anti-CTLA-4 antibody, IL-15/IL-15Rα, IL-12p70, and a STING GOF variant;
[0239] an anti-CTLA-4 antibody, IL-15/IL-15Rα, IL-21, and a STING GOF variant;
[0240] an anti-CTLA-4 antibody, IL-15/IL-15Rα, IL-12p70, a STING GOF variant, and 4-1BBL (including 4-1BBLΔcyt);
[0241] an anti-CTLA-4 antibody, IL-15/IL-15Rα, IL-21, a STING GOF variant, and 4-1BBL (including 4-1BBLΔcyt);
[0242] an anti-CTLA-4 antibody, IL-12p70, and IL-21;
[0243] an anti-CTLA-4 antibody, IL-12p70, IL-21, and a STING GOF variant;
[0244] an anti-CTLA-4 antibody, IL-12p70, IL-21, a STING GOF variant, and 4-1BBL (including 4-1BBLΔcyt);
[0245] an anti-CTLA-4 antibody and IL-12p70;
[0246] an anti-CTLA-4 antibody, IL-12p70, and a STING GOF variant;
[0247] an anti-CTLA-4 antibody, IL-12p70, a STING GOF variant, and 4-1BBL (including 4-1BBLΔcyt);
[0248] an anti-CTLA-4 antibody, IL-12p70, and IL-18;
[0249] an anti-CTLA-4 antibody, IL-12p70, IL-18, and a STING GOF variant;
[0250] an anti-CTLA-4 antibody, IL-12p70, IL-18, a STING GOF variant, and 4-1BBL (including 4-1BBLΔcyt);
[0251] an anti-CTLA-4 antibody and a STING GOF variant;
[0252] a CD40 agonist, IL-2, and IL-12p70;
[0253] a CD40 agonist, IL-2, and IL-21;
[0254] a CD40 agonist, IL-2, IL-12p70, and a STING GOF variant;
[0255] a CD40 agonist, IL-2, IL-21, and a STING GOF variant;
[0256] a CD40 agonist, IL-2, IL-12p70, a STING GOF variant, and 4-1BBL (including 4-1BBLΔcyt);
[0257] a CD40 agonist, IL-2, IL-21, a STING GOF variant, and 4-1BBL (including 4-1BBLΔcyt);
[0258] a CD40 agonist, IL-15/IL-15Rα, and a STING GOF variant;
[0259] a CD40 agonist, IL-15/IL-15Rα, a STING GOF variant, and 4-1BBL (including 4-1BBLΔcyt);
[0260] a CD40 agonist, IL-15/IL-15Rα, and IL-12p70;
[0261] a CD40 agonist, IL-15/IL-15Rα, and IL-21;
[0262] a CD40 agonist, IL-15/IL-15Rα, IL-12p70, and a STING GOF variant;
[0263] a CD40 agonist, IL-15/IL-15Rα, IL-21, and a STING GOF variant;
[0264] a CD40 agonist, IL-15/IL-15Rα, IL-12p70, a STING GOF variant, and 4-1BBL (including 4-1BBLΔcyt);
[0265] a CD40 agonist, IL-15/IL-15Rα, IL-21, a STING GOF variant, and 4-1BBL (including 4-1BBLΔcyt);
[0266] a CD40 agonist, IL-12p70, and IL-21;
[0267] a CD40 agonist, IL-12p70, IL-21, and a STING GOF variant;
[0268] a CD40 agonist, IL-12p70, IL-21, a STING GOF variant, and 4-1BBL (including 4-1BBLΔcyt);
[0269] a CD40 agonist and IL-12p70; a CD40 agonist, IL-12p70, and a STING GOF variant;
[0270] a CD40 agonist, IL-12p70, a STING GOF variant, and 4-1BBL (including 4-1BBLΔcyt);
[0271] a CD40 agonist, IL-12p70, and IL-18;
[0272] a CD40 agonist, IL-12p70, IL-18, and a STING GOF variant;
[0273] a CD40 agonist, IL-12p70, IL-18, a STING GOF variant, and 4-1BBL (including 4-1BBLΔcyt);
[0274] a tumor-associated antigen;
[0275] a CD40 agonist and a STING GOF variant. STING GOF variants include chimeric STING and non-human STING, including those described or exemplified herein, including those detailed above and below.

[0276] In all embodiments, the immunostimulatory bacterium provided herein, can also encode a tumor-associated antigen. These bacteria are of interest for use as vaccines and as therapeutics. Other exemplary combinations of encoded products include:
[0277] IL-2 and IL-12p70;
[0278] IL-2 and IL-21;
[0279] IL-2, IL-12p70, and a STING GOF variant;
[0280] IL-2, IL-21, and a STING GOF variant;
[0281] IL-2, IL-12p70, a STING GOF variant, and 4-1BBL (including 4-1BBLΔcyt), where Δcyt is a deleted cytoplasmic domain;
[0282] IL-2, IL-21, a STING GOF variant, and 4-1BBL (including 4-1BBLΔcyt);
[0283] IL-15/IL-15Rα, and a STING GOF variant;
[0284] IL-15/IL-15Rα, a STING GOF variant, and 4-1BBL (including 4-1BBLΔcyt);
[0285] IL-15/IL-15Rα and IL-12p70;
[0286] IL-15/IL-15Rα and IL-21;
[0287] IL-15/IL-15Rα, IL-12p70, and a STING GOF variant;
[0288] IL-15/IL-15Rα, IL-21, and a STING GOF variant;
[0289] IL-15/IL-15Rα, IL-12p70, a STING GOF variant, and 4-1BBL (including 4-1BBLΔcyt);
[0290] IL-15/IL-15Rα, IL-21, a STING GOF variant, and 4-1BBL (including 4-1BBLΔcyt);
[0291] IL-12p70 and IL-21;
[0292] IL-12p70, IL-21, and a STING GOF variant;
[0293] IL-12p70, IL-21, a STING GOF variant, and 4-1BBL (including 4-1BBLΔcyt);
[0294] IL-12p70 and a STING GOF variant;
[0295] IL-12p70, a STING GOF variant, and 4-1BBL (including 4-1BBLΔcyt);
[0296] IL-12p70 and IL-18;
[0297] IL-12p70, IL-18, and a STING GOF variant;
[0298] IL-12p70, IL-18, a STING GOF variant, and 4-1BBL (including 4-1BBLΔcyt);
[0299] a TGF-β decoy receptor, IL-2, and IL-12p70;
[0300] a TGF-β decoy receptor, IL-2, and IL-21;
[0301] a TGF-β decoy receptor, IL-2, IL-12p70, and a STING GOF variant;
[0302] a TGF-β decoy receptor, IL-2, IL-21, and a STING GOF variant;
[0303] a TGF-β decoy receptor, IL-2, IL-12p70, a STING GOF variant, and 4-1BBL (including 4-1BBLΔcyt);
[0304] a TGF-β decoy receptor, IL-2, IL-21, a STING GOF variant, and 4-1BBL (including 4-1BBLΔcyt);
[0305] a TGF-β decoy receptor, IL-15/IL-15Rα, and a STING GOF variant;
[0306] a TGF-β decoy receptor, IL-15/IL-15Rα, a STING GOF variant, and 4-1BBL (including 4-1BBLΔcyt);
[0307] a TGF-β decoy receptor, IL-15/IL-15Rα, and IL-12p70;
[0308] a TGF-β decoy receptor, IL-15/IL-15Rα, and IL-21;
[0309] a TGF-β decoy receptor, IL-15/IL-15Rα, IL-12p70, and a STING GOF variant;
[0310] a TGF-β decoy receptor, IL-15/IL-15Rα, IL-21, and a STING GOF variant;
[0311] a TGF-β decoy receptor, IL-15/IL-15Rα, IL-12p70, a STING GOF variant, and 4-1BBL (including 4-1BBLΔcyt);
[0312] a TGF-β decoy receptor, IL-15/IL-15Rα, IL-21, a STING GOF variant, and 4-1BBL (including 4-1BBLΔcyt);
[0313] a TGF-β decoy receptor, IL-12p70, and IL-21;
[0314] a TGF-β decoy receptor, IL-12p70, IL-21, and a STING GOF variant;
[0315] a TGF-β decoy receptor, IL-12p70, IL-21, a STING GOF variant, and 4-1BBL (including 4-1BBLΔcyt);
[0316] a TGF-β decoy receptor and IL-12p70;
[0317] a TGF-β decoy receptor, IL-12p70, and a STING GOF variant;
[0318] a TGF-β decoy receptor, IL-12p70, a STING GOF variant, and 4-1BBL (including 4-1BBLΔcyt);
[0319] a TGF-β decoy receptor, IL-12p70, and IL-18;
[0320] a TGF-β decoy receptor, IL-12p70, IL-18, and a STING GOF variant;
[0321] a TGF-β decoy receptor, IL-12p70, IL-18, a STING GOF variant, and 4-1BBL (including 4-1BBLΔcyt);
[0322] a TGF-β decoy receptor and a STING GOF variant;
[0323] an anti-CTLA-4 antibody, IL-2, and IL-12p70;
[0324] an anti-CTLA-4 antibody, IL-2, and IL-21;
[0325] an anti-CTLA-4 antibody, IL-2, IL-12p70, and a STING GOF variant;
[0326] an anti-CTLA-4 antibody, IL-2, IL-21, and a STING GOF variant;
[0327] an anti-CTLA-4 antibody, IL-2, IL-12p70, a STING GOF variant, and 4-1BBL (including 4-1BBLΔcyt);
[0328] an anti-CTLA-4 antibody, IL-2, IL-21, a STING GOF variant, and 4-1BBL (including 4-1BBLΔcyt);
[0329] an anti-CTLA-4 antibody, IL-15/IL-15Rα, and a STING GOF variant;
[0330] an anti-CTLA-4 antibody, IL-15/IL-15Rα, a STING GOF variant, and 4-1BBL (including 4-1BBLΔcyt);
[0331] an anti-CTLA-4 antibody, IL-15/IL-15Rα, and IL-12p70;
[0332] an anti-CTLA-4 antibody, IL-15/IL-15Rα, and IL-21;
[0333] an anti-CTLA-4 antibody, IL-15/IL-15Rα, IL-12p70, and a STING GOF variant;
[0334] an anti-CTLA-4 antibody, IL-15/IL-15Rα, IL-21, and a STING GOF variant;
[0335] an anti-CTLA-4 antibody, IL-15/IL-15Rα, IL-12p70, a STING GOF variant, and 4-1BBL (including 4-1BBLΔcyt);
[0336] an anti-CTLA-4 antibody, IL-15/IL-15Rα, IL-21, a STING GOF variant, and 4-1BBL (including 4-1BBLΔcyt);
[0337] an anti-CTLA-4 antibody, IL-12p70, and IL-21;
[0338] an anti-CTLA-4 antibody, IL-12p70, IL-21, and a STING GOF variant;
[0339] an anti-CTLA-4 antibody, IL-12p70, IL-21, a STING GOF variant, and 4-1BBL (including 4-1BBLΔcyt);
[0340] an anti-CTLA-4 antibody and IL-12p70;
[0341] an anti-CTLA-4 antibody, IL-12p70, and a STING GOF variant;
[0342] an anti-CTLA-4 antibody, IL-12p70, a STING GOF variant, and 4-1BBL (including 4-1BBLΔcyt);
[0343] an anti-CTLA-4 antibody, IL-12p70, and IL-18;
[0344] an anti-CTLA-4 antibody, IL-12p70, IL-18, and a STING GOF variant;
[0345] an anti-CTLA-4 antibody, IL-12p70, IL-18, a STING GOF variant, and 4-1BBL (including 4-1BBLΔcyt);
[0346] an anti-CTLA-4 antibody and a STING GOF variant;
[0347] a CD40 agonist, IL-2, and IL-12p70;
[0348] a CD40 agonist, IL-2, and IL-21;
[0349] a CD40 agonist, IL-2, IL-12p70, and a STING GOF variant;
[0350] a CD40 agonist, IL-2, IL-21, and a STING GOF variant;
[0351] a CD40 agonist, IL-2, IL-12p70, a STING GOF variant, and 4-1BBL (including 4-1BBLΔcyt);
[0352] a CD40 agonist, IL-2, IL-21, a STING GOF variant, and 4-1BBL (including 4-1BBLΔcyt);
[0353] a CD40 agonist, IL-15/IL-15Rα, and a STING GOF variant;
[0354] a CD40 agonist, IL-15/IL-15Rα, a STING GOF variant, and 4-1BBL (including 4-1BBLΔcyt);
[0355] a CD40 agonist, IL-15/IL-15Rα, and IL-12p70;
[0356] a CD40 agonist, IL-15/IL-15Rα, and IL-21;
[0357] a CD40 agonist, IL-15/IL-15Rα, IL-12p70, and a STING GOF variant;
[0358] a CD40 agonist, IL-15/IL-15Rα, IL-21, and a STING GOF variant;
[0359] a CD40 agonist, IL-15/IL-15Rα, IL-12p70, a STING GOF variant, and 4-1BBL (including 4-1BBLΔcyt);
[0360] a CD40 agonist, IL-15/IL-15Rα, IL-21, a STING GOF variant, and 4-1BBL (including 4-1BBLΔcyt);
[0361] a CD40 agonist, IL-12p70, and IL-21;
[0362] a CD40 agonist, IL-12p70, IL-21, and a STING GOF variant;
[0363] a CD40 agonist, IL-12p70, IL-21, a STING GOF variant, and 4-1BBL (including 4-1BBLΔcyt);
[0364] a CD40 agonist and IL-12p70;**
[0365] a CD40 agonist, IL-12p70, and a STING GOF variant;
[0366] a CD40 agonist, IL-12p70, a STING GOF variant, and 4-1BBL (including 4-1BBLΔcyt);
[0367] a CD40 agonist, IL-12p70, and IL-18;
[0368] a CD40 agonist, IL-12p70, IL-18, and a STING GOF variant;
[0369] a CD40 agonist, IL-12p70, IL-18, a STING GOF variant, and 4-1BBL (including 4-1BBLΔcyt);
[0370] a CD40 agonist and a STING GOF variant;
[0371] a bi-specific T-cell engager (BiTe)+a STING protein, a BiTe+IL-15, a BiTe+IL-15+a STING protein, where the BiTe targets DLL3, EGFR, Her2, CEA, Mesothelin, PSMA, EpCAM, CD74, Folate Receptor, Nectin4, EphA2, CA-IX, B7H3, Siglec-15, Muc1, or Lewis Y antigen;
[0372] a tumor antigen(s)+STING gain-of-function variant;
[0373] a therapeutic composition of a tumor antigen(s) and IL-15;
[0374] a therapeutic composition of a tumor antigen(s)+IL-15+a STING gain-of-function variant;
[0375] one or more antigens and an IFN;
[0376] one or more antigens and an IFNα;
[0377] one or more antigens, and IFNα2 or an IFNα1-16;
[0378] one or more antigens and any of IFNα1-16;
[0379] one or more antigens and IFN-β;
[0380] one or more antigens, IFNα2, and IFN-β;
[0381] one or more antigens and an IRF3 GOF variant with the mutation S396D;
[0382] one or more antigens, IFNα2 or an IFNα1-16, and an IRF3 GOF variant with the mutation S396D;
[0383] IFNalpha2+IRF3-S396D;
[0384] IFNα1-16+IRF3-S396D;
[0385] IFNalpha2+IFN-beta;
[0386] IFNα1-16+IFN-beta
[0387] FLT-3L, or sialidase, or IL-12p35, or Azurin, or a membrane anchored IL-2, IL-12, IL-12p35, IL-21, IL-15, FLT-3L, alone or in combination with other immunostimulatory proteins; and
[0388] a TLR8 agonist, where the agonist is polyU or polyU/G, a microRNA, or miR-21, alone or in combination with any of the immunostimulatory proteins. In all embodiments, the immunostimulatory bacteria can encode a tumor-associated antigen, such as, for example, any listed in the table above, and described herein.

[0389] Other encoded therapeutic products include, for example, a bi-specific T-cell engager, such as, for example, one that binds Delta-like ligand 3 (DLL3) and CD3. In all embodiments, the immunostimulatory bacteria can encode a cytokine, such as a cytokine, and a modified or variant STING protein. The immunostimulatory bacteria a encode immunostimulatory protein(s) that confers or contributes to anti-tumor immunity in the tumor microenvironment, such as a cytokine or a chemokine that confer or contribute to anti-tumor immunity in the tumor microenvironment. Exemplary of cytokines are IL-15, IL-2, and IL-12, such as IL-15/IL-15R alpha chain complex. Exemplary of cytokines are IL-15, IL-2, and IL-12, such as IL-15/IL-15R alpha chain complex. Exemplary of STING proteins are any described herein, particularly those that include gain-of-function mutations so that the STING protein constitutively induces type I IFN. The STING protein also can be modified or be selected so that it has lower NF-κB signaling activity than human STING, so that NF-κB signaling is low, and type I IFN induction is constitutive.

[0390] Exemplary STING proteins is a chimeric STING protein that comprises a human STING protein with the CTT from Tasmanian devil, or is chimeric STING that comprises a human STING protein with the CTT from Tasmanian devil and having one or more gain-of-function mutations, such as one or both of N154S and R284G or any of the mutations described herein or known in the art to effect constitutive activity. Exemplary modified STING gain-of-function variant are any described herein.

[0391] The encoded therapeutic products can comprise a multimerization domain, such as an Fc domain. Other encoded therapeutic products include any described herein, such as a product that is a B7 protein transmembrane domain, and/or a bi-specific T-cell engager antibody. The encoded therapeutic products can be GPI-anchored, or include moieties, such as polypeptides, such as human serum albumin (HSA) or a portion thereof, that increase serum half-life of the encoded product. The therapeutic products can be other fusion proteins, such as a fusion to collagen.

[0392] The immunostimulatory bacterium can be derived from any suitable bacterial species, including, but are not limited to, species such as Salmonella, Listeria, and E. coli, and any listed or described herein. The immunostimulatory bacterium contain genome modifications, whereby the bacteria do not infect or have reduced infectivity of epithelial cells, and modified LPS to attenuate the bacteria and/or to increase uptake or infection of phagocytic cells, such as tumor-resident macrophage, and to increase tumor colonization. Various genome modifications are described herein that effect such properties. Strains include those that lack flagella and have penta-acylated LPS. Exemplary strains, include those designated YS1646Δasd/ΔFLG/ΔpagP/ΔansB/ΔcsgD/F-ΔpurI, or YS1646Δasd/ΔFLG/ΔpagP/ΔansB/ΔcsgD/F-ΔpurI/ΔthyA, and other strains that contain genome modifications whereby the bacteria are adenosine auxotrophs, lack flagella, have penta-acylated LPS, such as by genome modifications that render the bacteria msbB⁻/pagP⁻, and optionally lack or have a reduction in curli fimbriae.

[0393] The bacteria provided herein are useful as therapeutics for diseases, disorders, and conditions, such as cancers. They also are useful as vaccines to prevent (reduce the risk of the diseases, disorders, and conditions, or the severity thereof) or treat diseases, disorders, and conditions, such as one caused by a pathogen or cancers. They can be designed, as described herein, so that they deliver RNA. Provided are genome modified bacteria that comprise genome modifications, whereby the response by toll-like receptors (TLRs) 2, 4, and 5 is reduced compared to the bacterium without the genome modifications, wherein:
[0394] the bacterium comprises further genomic modifications whereby it is auxotrophic for a required nutrient or factor so that it is unable to replicate in a eukaryotic host, but can replicate in vitro when supplied with the nutrient or factor;
[0395] the bacterium comprises a plasmid containing nucleic acid encoding a product, or comprises RNA encoding the product;
[0396] the product encoded by the nucleic acid or RNA is an antigenic sequence or sequences from pathogen that is a pathogenic virus, bacterium, or parasite, or is a tumor antigen, whereby, upon expression of the encoded antigen in the host, the host develops an immune-protective response or immunizing response against the pathogenic virus, bacterium, parasite, or tumor antigen, or the product is a therapeutic product;
[0397] expression of the antigenic sequence(s) is/are under control of a prokaryotic promoter so that RNA encoding the antigen(s) is produced in the bacterium;
[0398] nucleic acid encoding the antigen comprises regulatory sequences that inhibit or prevent translation of encoded RNA by bacterial ribosomes, but that does not inhibit or prevent translation of the encoded RNA by eukaryotic host ribosomes, whereby translation is de-coupled from transcription in the bacterium;
[0399] the resulting bacterium is selective for infecting phagocytic cells when administered to a eukaryotic subject, and delivers the nucleic acid into the phagocytic cells, wherein the RNA is translated.

[0400] These immunostimulatory bacterium can encode a plurality of products, which can be encoded as polycistronic message or under control of separate promoters, or in any suitable configuration. The nucleic acid encoding the products or at least the antigenic sequence(s) can comprise sequences that prevent or inhibit translation by a prokaryotic host, such as the bacterium, and/or include sequences that facilitate translation in a eukaryotic host, while inhibiting or preventing translation in the bacterium. Exemplary of such sequences is an internal ribosomal entry site (IRES) sequence, whereby host cell translation is facilitated or enhanced, and bacterial translation is inhibited or prevented. As a result the products encoded in the bacterium are transcribed into RNA, but not translated until they are in a eukaryotic host. The bacteria thereby serve as RNA delivery vehicles. Exemplary of an IRES is where the IRES is a Vascular Endothelial Growth Factor and Type 1 Collagen Inducible Protein (VCIP) IRES. Exemplary bacterium are provided, where the nucleic acid encoding the antigen(s) comprises a VCIP or other IRES that inhibits or reduces translation in the bacterium, and permits and optionally promotes or enhances translation in a eukaryotic host. The translational regulatory sequence, such as the IRES or the VCIP IRES, can be included in the plasmid, at a position that is 3′ of the promoter and 5′ of the antigen(s) coding sequence. An exemplary of a VCIP IRES is set forth in SEQ ID NO:434 or is a sequence that has at least 98% sequence identity therewith and has activity as an IRES.

[0401] Pathogens from which or against which the encoded antigens are derived include any pathogen, such as a bacterium or a virus. The encoded antigens also include tumor antigens. The resulting bacterium can be a vaccine to prevent or treat a viral infection or a bacterial infection or to prevent or treat a cancer. The pathogen can be selected from among viruses that causes chronic viral infections. Exemplary of infections are infections caused by hepatitis viruses, herpes viruses, varicella zoster virus (VZV), Epstein-Barr virus, human immunodeficiency virus (HIV), human T-cell leukemia virus (HTLV), Respiratory Syncytial Virus (RSV), measles virus, and other viruses that chronically infect subjects. The infection can be an acute infection, such as an infection caused by Severe Acute Respiratory Syndrome coronavirus (SARS-CoV), Middle East Respiratory Syndrome coronavirus (MERS-CoV), or Severe Acute Respiratory Syndrome species of Escherichia, Staphylococcus, Pseudomonas, Actinobacteria, Archaeobacteria, Mycobacteria or Porphyromonas. Other pathogens include P. gingivalis, SARS-CoV2, or E. coli, or Haemophilus influenza.

[0402] The plasmid in the bacterium can encode an antigen, and also can further encode an immunostimulatory protein or other adjuvant, as well as a combination of immunostimulatory proteins or other therapeutic proteins, such as a STING protein particularly a modified STING that comprises gain-of-function mutation and/or a chimeric STING protein, such as any described herein. Hence any of the bacterium described herein can be provided so that they deliver mRNA encoding any of the products and combinations described herein. The products can be encoded in the plasmid as part of a polycistronic sequence with expression of the antigen under control of a prokaryotic promoter recognized by the bacterium; or the immunostimulatory protein(s) and/or other therapeutic proteins are encoded on the plasmid under control of a eukaryotic promoter recognized by the eukaryotic host. The resulting bacterium can comprise mRNA encoding the antigen(s) and any other proteins expressed under control of a prokaryotic promoter, where the mRNA is produced by culturing the bacterium in vitro. The bacteria include those that comprises genome modifications whereby the bacterium lacks flagella and produces LPS with penta-acylated lipid A. The bacteria can optionally be asd⁻ or thyA⁻ or both, and/or one or both of an adenosine auxotroph, and csgD⁻, and is optionally ansB⁻. The bacterium can comprise or further comprise nucleic acid encoding a TLR8 agonist, such as, for example, polyU, polyU/G, a microRNA, or miR-21. Exemplary of the bacteria is one that is msbB⁻/pagP⁻, lacks flagella, and is asd⁻ or thyA⁻ or both asd⁻ and thyA⁻. Exemplary bacterial species, include, but are not limited to, a species or strain of Escherichia, Listeria, Mycobacteria, or Salmonella. The bacterium can be a strain of Salmonella, such as a Salmonella typhimurium. The unmodified Salmonella can be a wild-type strain, or the unmodified Salmonella strain can be an attenuated strain. Exemplary of the starting bacteria are those derived from strain VNP20009 or YS1646, or from strain ATCC 14028, or from a strain having all of the identifying characteristics of strain ATCC 14028.

[0403] Genome modifications include any modification that results in a change the nucleic acid sequence, and generally a phenotype. Genome modifications include one or more of a deletion, insertion, disruption, transposition, and other modification in a gene, whereby the product encoded by the gene is not produced or, as produced, is inactive.

[0404] Promoters that control expression of the encoded products in the plasmid can be prokaryotic promoters, particularly in embodiments in which the bacterium is provided as a vaccine and/or as an RNA delivery vehicle. These include embodiments in which the product is expressed in vitro in the bacterium prior to administration to a subject, such as a human or animal. Prokaryotic promoters include bacterial promoters and bacterial phage promoters. Any promoter recognized by the bacterial RNA polymerase or by an encoded phage polymerase.

[0405] Provided are vaccines, comprising ay of the bacteria provided herein, particularly those that encode antigens for immunization for treatment or prevention, in an amount and in a vehicle for administration into a subject to elicit an adaptive immune response in a subject. The vaccine and other compositions containing the bacteria provided herein can be formulated for any route of administration, such as formulated as an aerosol, or as a powder, or as a tablet, or a suppository. They can be formulated for oral administration, nasal administration, inhalation administration, rectal administration, vaginal administration, intraocular administration, intracranial administration, intradermal administration, or intramuscular administration.

[0406] Provided are vaccines that comprise nucleic acid encoding an antigen from a protein from a viral pathogen, such as a respiratory virus, such as a corona virus, such as SARS-COV2, formulated for nasal or pulmonary inhalation. The vaccine is formed and formulated such that it does not sufficiently activate TLR2, whereby the vaccine induces type I IFN. Activation of TLR2 inhibits or reduces activation of type I IFN; thus, a vaccine that does not activate TLR2 or does so at a low enough level so that type I IFN is activated, such as by the immunostimulatory bacteria and vaccines provided herein.

[0407] The vaccines, also are formed/formulated so that they do not activate or have low enough activation of a TLR4 and/or TLR5 response sufficient to decease or inhibit type I IFN, so that type I IFN is expressed. As described herein, many vaccines and delivery vectors designed to stimulate type I IFN expression, also have properties that activate TLR2, 4 and/or 5, which activation is at level sufficient to inhibit or reduce type I IFN expression. The immunostimulatory bacterium and vaccines provided herein are designed so that they do not sufficiently activate particularly TLR2, and also TLR4 and/or TLR5, so that expression of type I IFN is not reduced or inhibited by the bacterium or vaccine.

[0408] Provided are vaccines that comprise nucleic acid that encodes an antigen or protein or epitope from a pathogen or tumor, where the vaccine elicits an immune response against the pathogen or tumor; the pathogen is a respiratory pathogen that infects the respiratory system including the lungs and/or naso-pharynx; the tumor is a lung or respiratory tract tumor; the vaccine is formulated for inhalation through the nose or lungs; the vaccine delivers the nucleic acid to phagocytic macrophages to convert the immunosuppressive phagocytic macrophages to immunostimulatory, phagocytic macrophages that are capable of in situ antigen cross-presentation to CD8+ T-cells, and of migration to lymph nodes to prime CD4+ and CD8+ T-cells. The vaccine is designed, formed, and/or formulated so that it does not activate a TLR4 and/or TLR5 response sufficient to decease or inhibit type I IFN. Vaccines that do not activate TLR2/4/5 sufficiently to decrease or inhibit type IF are provided. The vaccines can encode product so that the vaccine elicits an immune response against a pathogen, such as a virus. Virus pathogens include mRNA viruses, such as a corona virus or influenza virus. Corona viruses include, SARS virus, such as a SARS-COV2 virus. The vaccines encode an antigen, protein, or epitope of from a pathogen, such as a viral antigen, protein, or epitope. Exemplary of proteins is a capsid or nucleoprotein. For example, where the virus is SARS-COV2, the protein or epitope is or is from a protein designated or encoded by S1, S2, Envelope (E), Membrane (M), Nucleocapsid (N), ORF3a, ORF6, ORF7a, ORF7b, and ORF8, such as a protein or epitope that is or is from or is a spike protein. The vaccines include the bacteria provided herein that deliver mRNA, such as mRNA encoding the protein or antigen. The mRNA include mRNA that is modified to increase stability of the mRNA and/or the stability of the encoded protein or antigen or epitope. The encoded proteins can be modified, such as modifications that alter the structure of the protein to alter interaction with host cell proteins. For example, mRNA and proteins have been designed that improve or increase or stabilize the interaction of the encoded protein or epitope with a cell surface receptor. Modified mRNA encoding the spike protein from a SARS-COV2 virus has been designed; the skilled person similarly can design other modified proteins/mRNA from other viruses to enhance or improve the efficacy in preventing or reducing or ameliorating the disease caused by the virus. The vaccines can be delivery vehicles, such as oncolytic viruses and immunostimulatory bacteria, that comprise nucleic acid that encodes an antigen or protein from a pathogen, or encodes a tumor antigen.

[0409] The immunostimulatory bacteria comprise genome modifications so that they have penta-acylated lipopolysaccharides (LPS), and lacks flagella, wherein wild-type bacterium has flagella. As a result, the bacteria do not elicit an inflammatory response or elicit a reduced inflammatory response compared, for example, to the bacterium designated VNP20009. Additionally, the bacteria can comprise genome modifications whereby they do not produce curli fimbriae. In addition to encoding immunostimulatory proteins, such as a cytosolic DNA RNA sensor pathway proteins, such as eSTING and a cytokine, such as an IL-15/IL-15R alpha chain complex or IL-15, they can encode a tumor-associated antigen (TAA). Products that are part of a cytosolic DNA/RNA sensor pathway that leads to expression of type I interferon (IFN), include for example, STING, IRF3, IRF5, IRF7, IRF8, MDA5, RIG-I, and particularly modified forms thereof that comprises a gain-of-function mutation, whereby expression of the type I interferon is constitutive. The immunostimulatory bacteria can be an attenuated bacterium or a Gram-negative bacterium, or is a Gram-positive bacterium.

[0410] Exemplary bacteria from which the immunostimulatory bacteria can be derived, include, but are not limited to strains of Salmonella, Shigella, E. coli, Bifidobacteriae, Rickettsia, Vibrio, Listeria, Klebsiella, Bordetella, Neisseria, Aeromonas, Francisella, Cholera, Corynebacterium, Citrobacter, Chlamydia, Haemophilus, Brucella, Mycobacterium, Mycoplasma, Legionella, Rhodococcus, Pseudomonas, Helicobacter, Bacillus, or Erysipelothrix, or Archaeobacteria, an attenuated strain thereof or a modified strain thereof of any of the preceding list of bacterial strains. The bacterium can be a strain, for example, of Shigella, E. coli, Listeria, or Salmonella.

[0411] For example, the bacterium can be a Rickettsia rickettsiae, Rickettsia prowazekii, Rickettsia tsutsugamuchi, Rickettsia mooseri, Rickettsia sibirica, Bordetella bronchiseptica, Neisseria meningitidis, Neisseria gonorrhoeae, Aeromonas eucrenophila, Aeromonas salmonicida, Francisella tularensis, Corynebacterium pseudotuberculosis, Citrobacter freundii, Chlamydia pneumoniae, Haemophilus somnus, Brucella abortus, Mycobacterium intracellulare, Mycobacterium tuberculosis, Staphylococcus aureus, Legionella pneumophila, Rhodococcus equi, Pseudomonas aeruginosa, Helicobacter mustelae, Vibrio cholerae, Bacillus subtilis, Erysipelothrix rhusiopathiae, Yersinia enterocolitica, Rochalimaea quintana, or Agrobacterium tumerfacium bacterium. Included are Salmonella typhimurium strains, such as an unmodified Salmonella is a wild-type strain, such as, for example, the unmodified Salmonella strain is attenuated, or for example, where the immunostimulatory bacterium is derived from strain VNP20009 or YS1646, or strain ATCC 14028, or a strain having all of the identifying characteristics of strain ATCC 14028.

[0412] The immunostimulatory bacteria can be ansB⁻, asd⁻, csgD⁻, purI⁻, msbB⁻, flagellin⁻, and pagP⁻ or that is ansB⁻, thyA⁻, csgD⁻, purI⁻, msbB⁻, flagellin⁻, and pagP⁻.

[0413] The bacterium can be modified to encode and express the gene resistance to complement killing (rck), such as, for example, Salmonella rck gene, such as an E. coli strain, such as Nissle, that is modified to express rck.

[0414] Also provided are pharmaceutical compositions that contain the therapeutics provided herein, including any of the immunostimulatory bacteria in a pharmaceutically acceptable vehicle. They can be formulated for systemic administration, such as formulated for parenteral administration, or intravenous administration, or intramuscular administration, or intratumoral administration, or intraperitoneal administration, or oral administration, or rectal administration, or vaginal administration, or intraocular administration, or intradermal administration, or intracranial administration, or mucosal administration, or oral, or administration by inhalation into the mouth or nose, or, for example, by rectal, or by aerosol into the lung and/or nose, or mucosal, or intracranial, or intradermal, or intratumoral.

[0415] Methods of treating cancer and uses of the therapeutics, including the immunostimulatory bacteria are provided. The cancers can comprise a solid tumor or a hematological malignancy or any other malignancy. The methods comprise administering the compositions. The subjects can be selected by, for example a biopsy to identify subjects whose tumors comprise proliferating macrophages, such as proliferating M2 macrophage by identifying macrophages with markers of proliferation, such as biopsy surface markers: CD68+KI67 and/or PCNA, MERTK. Proliferating macrophage can exhibit all of the above markers or a subset thereof. For example, gene expression of the G2M module, where more than half (>14 genes of the set) are expressed. Additionally STMN1+the G2M module can be used to confirm proliferating. Alternatively tumor macrophage can be biopsied and assed for expression of at least two of CD68, MERTK, and K167 and/or PCNA.

[0416] Combination therapies also are provided, such as regiments in which the subject is first treated with an agent, such as a chemotherapeutic that induces apoptosis in tumors, or a checkpoint inhibitor, such as an anti-PD-1 or anti-PD-L1 antibody, prior to administration of therapeutics provided herein. The second anti-cancer agent or treatment is administered before, concomitantly with, after, or intermittently with, the immunostimulatory bacterium, or pharmaceutical composition. The second anti-cancer agent or treatment can be an immunotherapy, or a chemotherapy, or surgery, or radiation, or combinations thereof.

[0417] Treated cancers include, but are not limited to, a cancer is selected from among leukemia; lymphoma; gastric cancer; and cancer of the breast, heart, lung, small intestine, colon, spleen, kidney, bladder, head and neck, colorectum, ovary, prostate, brain, pancreas, skin, bone, bone marrow, blood, thymus, uterus, testicles, cervix, and liver. The cancer can be metastatic.

[0418] Second agents include, but are not limited to, agents selected from among an anti-PD-1, anti-PD-L1, or anti-CTLA-4 antibody, anti-IL-6, anti-Siglec-15, anti-VEGF, anti-CD73, and anti-CD38 antibodies. Other exemplary second agents, can be selected from among a poly (ADP-ribose) polymerase (PARP) inhibitor, a histone deacetylase (HDAC) inhibitor, a chemotherapy agent, an anti-EGFR antibody, a CAR-T cell, an anti-Her2 antibody, an anti-mesothelin antibody, and an anti-B-cell maturation antigen (BCMA) antibody.

### Pharmaceutical Compositions

[0419] Provided are pharmaceutical composition, comprising any of the bacteria and/or vaccines provided herein. The bacterium or other delivery vehicle is formulated in in a pharmaceutically acceptable vehicle. The formulation can be a liquid, powder, such as a lyophilized powder, or tablet, or other suitable formulation. The vaccines, in particular, can be locally administered, such as, but not limited to, by inhalation, intramuscular, and transdermal administration, so that a local immune response can result to prevent or reduce the likelihood of or severity of an infection. For treating tumors, the bacteria and vaccines can be administered systemically, such as by intravenous administration, or can be ad mistered by intratumoral, or other route, such as intrahepatic, peritoneal, and other modes. The immunostimulatory bacteria accumulate and colonize phagocytic cells, particularly those at the locus of administration, and/or in phagocytic cells in the tumor microenvironment and in tumors.

### Methods and Uses

[0420] The vaccines and bacteria and pharmaceutical compositions provided herein are for use for treatment of diseases, disorders, and conditions, including cancer and infections, and for prevention or treatment or reduction in symptoms thereof. Provided are bacteria, referred to herein as immunostimulatory bacteria by virtue of their ability to accumulate in and phagocytic cells, including tumor-resident macrophage, and to stimulate an immune response by virtue of their properties and composition, additionally by virtue of the encoded payloads, and the combination of the properties and structure of the bacteria and the payloads. The bacteria can be used as therapeutics for treatment of diseases, disorders, and conditions, and by virtue of the components of the nucleic acid constructs in the plasmids in the bacteria can produce encoded proteins, and also can be used to deliver mRNA.

[0421] Methods of treatment of cancer and/or viral other pathogen infections are provided. The uses and methods include administering or using the RNA delivery systems and vaccines and immunostimulatory bacteria provided herein for treating or preventing (reducing the risk of or severity of the diseases, disorders, and condition) cancer and/or a viral infection. The immunostimulatory bacteria and vaccines are those that encode a tumor-associated antigen or viral or other pathogen antigen, protein or epitope.

[0422] Hence, provided are uses and methods of treatment using the immunostimulatory bacteria, vaccines, delivery vehicles and composition provided herein for use for treating or preventing (reducing the risk of developing) a disease or condition or infection or cancer.

[0423] Also provided are methods of converting an M2 macrophage to an M1 or M1-like phenotype, by administering the immunostimulatory bacterium that is modified as described herein, and that encodes an immunostimulatory protein, such STING, particularly a modified STING, and combinations of the modified STING with a cytokine, such as an IL-15, such as IL-15/IL-15R alpha chain complex. These immunostimulatory bacteria are used for treating or administered to a subject with a condition, disease, or disorder treated by enhancing an anti-viral or anti-tumor immune response. Uses of the immunostimulatory bacteria to convert an M2 macrophage to an M1 or M1-like phenotype macrophage in a subject with a condition, disease, or disorder treated by enhancing an anti-viral or anti-tumor immune response. The subject can have a disease, disorder, or condition that is a cancer and/or a viral or other pathogen infection.

[0424] Provided are methods of delivering RNA encoding a therapeutic product, comprising administering an immunostimulatory bacterium, designed as described above, and below, to deliver RNA, for treatment of a disease, condition, or disorder. Uses of such bacteria for treatment also are provided. Diseases, disorders, and conditions, include cancers and/or a viral or other pathogen infections. As described herein, the immunostimulatory bacteria are used to transcribe the encoded products in vitro, but not translate them, so that they deliver RNA, such as mRNA, when administered to a subject. Provided are bacteria for use for delivering RNA to a subject, comprising a plasmid encoding a heterologous product, where: the nucleic acid encoding the heterologous product is linked to a promoter recognized by the bacterium; and the nucleic acid encoding the product comprises eukaryotic sequences for translation that are not recognized by the bacterium, whereby the bacterium produces RNA, but does not translate the RNA. The bacteria deliver RNA encoding a therapeutic product and/or an antigen or protein from a pathogen or tumor for eliciting an immune response against the antigen or protein.

[0425] The encoded therapeutic products include any described herein and in the original claims, such as nucleic acid encoding a protein that is part of a cytosolic DNA/RNA sensor pathway that leads to expression of type I interferon (IFN), or a variant thereof. Type I IFNs include interferon-α and interferon-β. Variants include those that, when expressed in a subject, lead to constitutive expression of type I IFN. These include a gain-of-function (GOF) variant that does not require cytosolic nucleic acids, nucleotides, dinucleotides, or cyclic dinucleotides (CDNs) to result in expression of type I IFN. Exemplary of these proteins is a protein selected from among STING, RIG-I, MDA-5, IRF-3, IRF-5, IRF-7, IRF-8, TRIM56, RIP1, Sec5, TRAF3, TRAF2, TRAF6, STAT1, LGP2, DDX3, DHX9, DDX1, DDX9, DDX21, DHX15, DHX33, DHX36, DDX60, and SNRNP200, and variants thereof that have increased activity, or that result in constitutive expression of type I interferon (IFN). Variants include a variant of STING, RIG-I, IRF-3, or MDA5, in which one or more serine (S) or threonine (T) residue(s) that is/are phosphorylated as a consequence of viral infection, is/are replaced with an aspartic acid (D) residue, whereby the resulting variant is a phosphomimetic that constitutively induces type I IFN, and any known to those of skill in the art and/or described herein. Variants include, for example, those wherein the mutations are selected as follows: a) in STING, with reference to SEQ ID NOs: 305-309, one or more selected from among: S102P, V147L, V147M, N154S, V155M, G166E, C206Y, G207E, S102P/F279L, F279L, R281Q, R284G, R284S, R284M, R284K, R284T, R197A, D205A, R310A, R293A, T294A, E296A, R197A/D205A, S272A/Q273A, R310A/E316A, E316A, E316N, E316Q, S272A, R293A/T294A/E296A, D231A, R232A, K236A, Q273A, S358A/E360A/S366A, D231A/R232A/K236A/R238A, S358A, E360A, S366A, R238A, R375A, N154S/R284G, and S324A/S326A; b) in MDA5, with reference to SEQ ID NO:310, one or more of: T331I, T331R, A489T, R822Q, G821S, A946T, R337G, D393V, G495R, R720Q, R779H, R779C, L372F, and A452T; c) in RIG-I, with reference to SEQ ID NO:311, one or both of E373A and C268F; and d) in IRF-3, with reference to SEQ ID NO:312, S396D, such as a variant STING that contains one or more amino replacement(s) selected, with reference to SEQ ID NOs: 305-309, from among: S102P, V147L, V147M, N154S, V155M, G166E, C206Y, G207E, S102P/F279L, F279L, R281Q, R284G, R284S, R284M, R284K, R284T, R197A, D205A, R310A, R293A, T294A, E296A, R197A/D205A, S272A/Q273A, R310A/E316A, E316A, E316N, E316Q, S272A, R293A/T294A/E296A, D231A, R232A, K236A, Q273A, S358A/E360A/S366A, D231A/R232A/K236A/R238A, S358A, E360A, S366A, R238A, R375A, N154S/R284G, and S324A/S326A, and conservative replacements thereof, and combinations thereof.

[0426] The immunostimulatory bacteria also can encode an immunostimulatory protein that confers or contributes to an anti-tumor immune response in the tumor microenvironment. These include, but are not limited to, a cytokine, a chemokine, or a co-stimulatory molecule. Exemplary of these is a protein selected from among one or more of: IL-2, IL-7, IL-12p70 (IL-12p40+IL-12p35), IL-15, IL-36 gamma, IL-2 that has attenuated binding to IL-2Ra, IL-15/IL-15R alpha chain complex, IL-18, IL-21, IL-23, IL-2 that is modified so that it does not bind to IL-2Ra, CXCL9, CXCL10, CXCL11, interferon-α, interferon-β, interferon-γ, CCL3, CCL4, CCL5, proteins that are involved in or that effect or potentiate the recruitment and/or persistence of T cells, CD40, CD40 ligand (CD40L), CD28, OX40, OX40 ligand (OX40L), 4-1BB, 4-1BB ligand (4-1BBL), members of the B7-CD28 family, CD47 antagonists, an anti-IL-6 antibody or an IL-6 binding decoy receptor, TGF-beta polypeptide antagonists, and members of the tumor necrosis factor receptor (TNFR) superfamily. The co-stimulatory molecule, selected from among CD40, CD40 ligand, CD28, OX40, OX40 ligand, 4-1BB, and 4-1BB ligand, can be truncated, such that the molecule lacks a cytoplasmic domain, or a portion thereof, for expression on an antigen-presenting cell (APC); and the truncated gene product is capable of constitutive immunostimulatory signaling to a T-cell through co-stimulatory receptor engagement, and is unable to counter-regulatory signal to the antigen-presenting cell (APC), due to the deleted, or partially deleted, or truncated cytoplasmic domain, which eliminates the immunosuppressive reverse signaling. Other such proteins are TGF-beta polypeptide antagonists, such as an anti-TGF-beta antibody or a fragment thereof, an anti-TGF-beta receptor antibody or a fragment thereof, a soluble TGF-beta antagonist polypeptide, or a TGF-beta binding decoy receptor.

[0427] The plasmids can encode a therapeutic antibody or antigen-binding fragment thereof, such as, for example, a Fab, Fab′, F(ab′)₂, single-chain Fv (scFv), Fv, dsFv, nanobody, diabody fragment, or a single-chain antibody. Examples include, but are not limited to, an antagonist of PD-1, PD-L1, CTLA-4, VEGF, VEGFR2, or IL-6.

[0428] The plasmids can encode complementary products whose expression results in enhanced anti-tumor or other activity. For example, the combination of a modified, such as a constitutively active and/or chimeric STING protein described herein, with a cytokine, such as IL-15/IL-15R alpha chain complex (IL-15Rα-IL-15sc), has synergistic activity.

[0429] The immunostimulatory bacteria provided herein can be used for treatment of benign nervous system tumors. The tumors include, for example, wherein the subject is a subject having or diagnosed as having a benign tumor or tumor-associated condition selected from among neurofibromatosis 1 (NF1); neurofibromatosis 2 (NF2); schwannomatosis; meningioma; schwannoma; vestibular schwannoma; sporadic schwannoma; neurofibroma; neurofibromatosis (NF); and combinations thereof. Provided are methods of treatment and uses of the immunostimulatory bacteria provided herein for treating a subject having or at risk of having a benign nervous system tumor by using for treatment or administering to the subject a therapeutically effective amount of a composition comprising the immunostimulatory bacteria as described herein, such as those comprising the phenotype YS1646Δasd/ΔFLG/ΔpagP/ΔansB/ΔcsgD or YS1646Δasd/ΔFLG/ΔpagP/ΔcsgD. The bacteria optionally can be in combination with an immune checkpoint inhibitor, such as anti-PD-1 antibody or antagonist, or other checkpoint, and/or angiogenesis inhibitor. The nervous system tumors include schwannomas using attenuated Salmonella typhimurium and optionally one or more checkpoint inhibitors. Uses and methods using VNP20009 for treating such tumors are known (see, e.g., U.S. Publication No. 2022/0125906 and Ahmed et al. (2022) Proc. Natl. Acad. Sci. U.S.A. 119:e2202719119, which describes treatment with VNP20009). The properties of the immunostimulatory bacteria provided herein are superior to the VNP20009, as described throughout the disclosure herein, and thus, provide improved treatment for such conditions.

[0430] The bacteria provided herein, such as those comprising the phenotype YS1646Δasd/ΔFLG/ΔpagP/ΔansB/ΔcsgD or YS1646Δasd/ΔFLG/ΔpagP/ΔcsgD, exhibit a broadly reduced systemic inflammatory signature, such as reduction in IL-2, TNF-alpha, IFN-gamma, IL-2, and IL-10, upon administration, as compared, for example, to the VNP20009 strain. The bacteria demonstrated safety up to the highest dose (3e⁹) tested in a primate study, including low pro-inflammatory cytokines, and no anti-bacterial antibodies. These bacteria enrich in tumors and immunoprivileged tissue, are taken up by phagocytic cells, such as macrophages, and do not infect epithelial or endothelial cells. The bacteria can deliver complementary payload combinations, and are internalized by macrophages. If DNA is delivered it is expressed by proliferating macrophages. The bacteria exhibit significant T-cell infiltration in T-cell excluded tumors. Treated tumors show increases in activated CD8+ T-cells, decreases in exhausted T-cells, and Treg cells. The data in the working examples show cures in rodent models, including metastatic disease and protection from tumor re-challenge.

### Modified STING Proteins and Encoding Nucleic Acids

[0431] The delivery vehicles, including the immunostimulatory bacteria, can deliver nucleic acid encoding or protein that is part of a cytosolic DNA/RNA sensor pathway that leads to expression of type I interferon (IFN). These include STING, MDA5, IRF-3, IRF-7, IRF-5, IRF8, and RIG-I, and variants thereof, that have increased or constitutive activity in inducing type I interferon (IFN) upon infection of a cell, such as a macrophage. Also contemplated are delivery of an agonist of one or more of STING, MDA5, IRF-3, IRF-5, IRF-7, IRF-8, and/or RIG-I. In accord with methods and uses herein, the delivery vehicles can deliver DNA for transcription and translation in the eukaryotic host cell, and RNA and proteins as produced, for example, in the bacteria as described herein. Effecting the change in phenotype to the hybrid M1/M2 phenotype, can be accomplished by delivering bacteria, proteins, and RNA into the macrophage. For expression of proteins the macrophage are those that are proliferating.

[0432] Exemplary of such products included for delivery are modified STING proteins that have increased or constitutive activity whereby type I IFN expression is increased or constitutive. In general, the STING proteins comprise mutations whereby, when introduced into a eukaryotic cell, such as a human, type I IFN expression is constitutive. The STING proteins also can have lower NF-κB signaling activity than human STING. The STING proteins are provided in delivery vehicles, such as the bacteria provided herein, and other delivery vehicles, such as oncolytic vectors and nanoparticles, that encode the modified STING proteins for expression in subject to whom the delivery vehicle is administered.

[0433] Provided are the modified STING proteins and encoding nucleic acids, including plasmids and constructs, for expression thereof. Reference to the modified STING proteins includes reference to the encoding nucleic acids, plasmids, and constructs. Provided are modified Stimulator of Interferon Genes (STING) proteins from a non-human species, where the non-human STING is one that has lower NF-κB signaling activity compared to human STING, and, optionally, higher type I interferon (IFN) pathway signaling activity compared to human STING, where: the non-human STING protein is modified to include a mutation or mutations so that it has increased activity or acts constitutively in the absence of cytosolic nucleic acids; the mutations are insertions, deletions, and/or replacements of amino acids; and the STING protein optionally has a deletion or disruption of the TRAF6 binding site.

[0434] Also provided are modified Stimulator of Interferon Genes (STING) proteins from a non-human species, or chimeric human STING proteins and modified forms thereof, comprising one or more mutation(s) associated with gain-of-function (GOF) that result in the constitutive activation of the encoded STING protein and/or enhanced sensitivity, or increased affinity or binding to endogenous ligands, whereby the STING protein is modified by one or more of an insertion, deletion, and replacement of an amino acid or amino acids; the STING protein has IFN-beta signaling activity, and attenuated nuclear factor kappa-light-chain-enhancer of activated B cell (NF-κB) signaling activity, compared to human STING; and the mutation or mutations result in increased STING activity or constitutive activity in inducing IFN-beta production. Human STING protein comprises the sequence set forth in any of SEQ ID NOs:305-309, or is a human allelic variant thereof with at least 98% sequence identity to the sequence of amino acids set forth in any of SEQ ID NOs:305-309.

[0435] The modified STING proteins include modified STING proteins, where: the STING protein is a chimera comprising replacement of a C-terminal tail (CTT) region in a STING protein from a first species, with the CTT of a STING protein from a second species; the STING protein of the second species has lower NF-κB signaling activity than the NF-κB signaling activity of human STING; and the TRAF6 binding site in the CTT optionally is deleted. Provided are the protein with the TRAF6 binding site, and without the TRAF6 binding site. Mutations that correspond to those that result in constitutive type I IFN expression include mutation or mutations is/are any that correspond to those associated with the auto-inflammatory disease STING-associated vasculopathy (SAVI) inhuman.

[0436] Provided are modified Stimulator of Interferon Genes (STING) proteins that are chimeras, comprising replacement of the CTT (C-terminal tail) region in a STING protein from a first species, with the CTT of a STING protein from a second species, where: the STING protein of the second species has lower NF-κB signaling activity than the NF-κB signaling activity of human STING; and the TRAF6 binding site in the CTT optionally is deleted. The chimeras can be a human STING protein with the replaced CTT, and optional TRAF6 binding site. Exemplary human STING protein comprises the sequence set forth in any of SEQ ID NOs:305-309, or is a human allelic variant thereof with at least 98% sequence identity to the sequence of amino acids set forth in any of SEQ ID NOs:305-309. For purposes of comparison when referencing human STING protein NF-κB signaling activity, the human STING protein has the sequence set forth in any of SEQ ID NOs:305-309, if necessary to specify a particular allele, reference is to the protein of SEQ ID NO:305. Exemplary chimeric STING proteins include those, where the first species is human, and the second species is selected from among Tasmanian devil, marmoset, cattle, cat, ostrich, boar, bat, manatee, crested ibis, coelacanth, and ghost shark. The chimeric STING proteins can include one or more of the mutations that render activity for inducing type I IFN expression constitutive.

[0437] In selecting a non-human STING protein for use in a chimera or for modification, the type I IFN signaling activity is at least or at least about 30%, 50%, 70%, 80% or more that of a wild type human STING protein, and generally is close to or higher than the human STING. The NF-κB signaling activity is less than 30%, less than 20%, less than 15%, less than 10%, or less than 5% that of wild type human STING NF-κB signaling activity. Exemplary of non-human species or second species is selected from among Tasmanian devil, marmoset, cattle, cat, ostrich, boar, bat, manatee, crested ibis, coelacanth, and ghost shark.

[0438] The modifications of STING are referenced by alignment with human STING of SEQ ID NOs:305-309, such as SEQ ID NO:305. Mutations that render a STING constitutive include, for example, a mutation or mutations that correspond, by reference to and alignment with human STING, to a mutation that occurs in an interferonopathy, wherein the sequence of human STING with which alignment is effected is set forth in any of SEQ ID NOs:305-309. Exemplary of such mutations is N154S, R284G, and N154S/R284G, and the others listed herein or known in the art. Exemplary of modified STING proteins are those that comprise replacement of the C-terminal tail (CTT) with the CTT from a STING protein that has reduced NF-κB signaling activity compared to the NF-κB signaling activity of human STING, such as where the replacing CTT is from a Tasmanian devil, marmoset, cattle, cat, ostrich, boar, bat, manatee, crested ibis, coelacanth, or ghost shark STING protein. Exemplary of replacing CTTs are any selected from among the following species Tasmanian devil, marmoset, cattle, cat, ostrich, boar, bat, manatee, crested ibis, coelacanth, or ghost shark STING protein, and it replaces the human STING CTT. Exemplary CTT sequences include those selected from among the following species and sequences

Tasmanian devil
SEQ ID NO: 371
RQEEFAIGPKRAMTVTTSSTLSQEPQLLISGMEQPLSLRTDGF,
Marmoset
SEQ ID NO: 372
EEEEVTVGSLKTSEVPSTSTMSQEPELLISGMEKPLPLRSDLF,
Cow
SEQ ID NO: 373
EREVTMGSTETSVMPGSSVLSQEPELLISGLEKPLPLRSDVF,
Cat
SEQ ID NO: 374
EREVTVGSVGTSMVRNPSVLSQEPNLLISGMEQPLPLRTDVF,
Ostrich
SEQ ID NO: 375
RQEEYTVCDGTLCSTDLSLQISESDLPQPLRSDCL,
Boar
SEQ ID NO: 376
EREVTMGSAETSVVPTSSTLSQEPELLISGMEQPLPLRSDIF,
Bat
SEQ ID NO: 377
EKEEVTVGTVGTYEAPGSSTLHQEPELLISGMDQPLPLRTDIF,
Manatee
SEQ ID NO: 378
EREEVTVGSVGTSVVPSPSSPSTSSLSQEPKLLISGMEQPLPLR
TDVF,
Crested ibis
SEQ ID NO: 379
CHEEYTVYEGNQPHNPSTTLHSTELNLQISESDLPQPLRSDCF,
Coelacanth
(variant 1)
SEQ ID NO: 380
QKEEYFMSEQTQPNSSSTSCLSTEPQLMISDTDAPHTLKRQVC,
Coelacanth
(variant 2)
SEQ ID NO: 381
QKEEYFMSEQTQPNSSSTSCLSTEPQLMISDTDAPHTLKSGF,
and
Ghost shark
SEQ ID NO: 383
LTEYPVAEPSNANETDCMSSEPHLMISDDPKPLRSYCP,

and
[0439] allelic variants of each of these sequences, or variants having at least 98% sequence identity thereto.

[0440] The human CTT that can be replaced, comprises, for example, the sequence EKEEVTVGSLKTSAVPSTSTMSQEPELLISGMEKPLPLRTDFS (SEQ ID NO:370), or is an allelic or other variant having at least 98% sequence identity thereto. An exemplary chimeric STING is on that is a chimera in which the human STING CTT is replaced with a CTT from the Tasmanian devil STING. The chimera optionally includes a mutation or mutations rendering the type I IFN expression constitutive, where the STING protein is active in the absence of inducing ligands and/or inducing cytosolic nucleic acids. The replacing CTT from Tasmanian devil STING comprises the sequence: RQEEFAIGPKRAMTVTTSSTLSQEPQLLISGMEQPLSLRTDGF (SEQ ID NO:371), or is an allelic or other variant having at least 98% sequence identity thereto. The modified STING proteins optionally comprise deletion or disruption of the TRAF6 binding site, such as the TRAF6 binding site that comprises the amino acid residues DFS at the C-terminus as in human STING.

[0441] Modifications that render activity constitutive include, for example, one or more amino acid replacements that correspond(s) to one or more of S102P, V147L, V147M, N154S, V155M, G166E, C206Y, G207E, S102P/F279L, F279L, R281Q, R284G, R284S, R284M, R284K, R284T, R197A, D205A, R310A, R293A, T294A, E296A, R197A/D205A, S272A/Q273A, R310A/E316A, E316A, E316N, E316Q, S272A, R293A/T294A/E296A, D231A, R232A, K236A, Q273A, S358A/E360A/S366A, D231A/R232A/K236A/R238A, S358A, E360A, S366A, R238A, R375A, and S324A/S326A, with reference, for alignment, to the sequence of human STING, as set forth in any of SEQ ID NOs:305-309. Exemplary of these are replacements corresponding to C206Y or R284G or N154S and combinations thereof, with reference to the sequence of human STING, as set forth in any of SEQ ID NOs:305-309.

[0442] Immunostimulatory bacteria provided herein can be used as a vaccine (and as a cancer therapeutic) by encoding an antigen against which an immune response, or immunization, or immuno-protection is desired. The immunostimulatory bacteria herein can be used to deliver RNA, such as mRNA or other forms, for use as a vaccine or for delivery of a therapeutic. As described herein, the bacteria contain a plasmid that encodes a product of interest, such as a therapeutic product, such as an antigen from a pathogen, under control of a bacterial or other prokaryotic promoter recognized by the bacterium. The encoding nucleic acid cassette includes a regulatory sequence or other sequence that blocks or inhibits or prevents translation by bacterial ribosomes, but that permits, provides for, or enhances translation by eukaryotic ribosomes, such as those present in human cells. The bacteria are modified so that they cannot grow or replicate in eukaryotes, such as by rendering the bacteria asd⁻ which require DAP for growth in vitro, or thyA⁻, which requires thymidine monophosphate precursors, for growth, but can be cultured in vitro so that they produce the encoded RNA. A skilled person can inactivate the gene or product by modifying the endogenous gene, such as by deletions, insertions, replacements, transpositions, or any such modification so that active enzyme is not produced. See, SEQ ID NO:464 for an exemplary thyA gene from Salmonella, and SEQ ID NO:465 for the encoded protein. RNA, encoding protein and/or antigen for immunization, is encoded in the plasmid, but the encoding nucleic acid includes translation signals/sequences so that bacteria cannot translate the RNA. The resulting bacteria deliver the encoded RNA into the host phagocytic cells, where it is translated by host cell ribosomes. Immunostimulatory bacteria that are thyA⁻ have genome modifications, such insertions, deletions, replacements, or other changes, that result in inactive or eliminate production of thymidylate synthase, which catalyzes the reductive methylation of dUMP to dTMP, a DNA biosynthesis precursor (precursor to dTTP).

[0443] ΔthyA auxotrophies for other nutrients and essential products can be introduced in place of or in addition to the asd inactivation/deletion. Other deletions or inactivation of genes or gene products required for growth, such as genes that produce nutrients, can be used in place of or in addition to the asd, and include for example thyA (see, e.g., Loessner et al. (2006) FEBS Lett. 265:81-88). Elimination of expression or production or other attenuating mutations of the bacterial genome for production of such products results in release of encoded macromolecules upon bacterial cell death in vivo after administration. Asd is an essential enzyme for bacterial cell wall synthesis; ThyA is an enzyme needed for DNA synthesis. Mutation of the respective genes renders the strain auxotrophic for diaminopimelic acid (DAP) or thymidine monophosphate precursors. Upon deprivation of the complementing substrates, such bacteria die by DAP-less or thymine-less death, resulting in release of bacterial proteins and plasmid. Inactivation or elimination of Asd, results in release of macromolecules; elimination or inactivation of ThyA (to produce ΔthyA bacteria) expression/activity does not result in release of macromolecules, including proteins and plasmids, upon thymidine starvation (Leossner et al. (2006) FEBS Lett. 265:81-88). Thus, ΔthyA are advantageous for in vivo delivery of plasmids to host cells, since the bacteria will not prematurely release their contents. Since the bacteria provided here infect or accumulate in myeloid cells, such as phagocytic cells, such as macrophages, dendritic cells, monocytes and neutrophils, which consume bacteria, the intact ΔthyA bacteria, release the plasmid encoding the therapeutic product inside the targeted cells.

[0444] The bacteria are genome-modified so that they are attenuated, such as the bacteria herein, where the response by toll-like receptors (TLR) 2, 4, and 5 is reduced, compared to bacteria without such genome modifications, and optionally, encode rck (resistance to complement killing) to reduce inactivation by complement, and include modifications, as needed, so that they infect primarily or only phagocytic cells, such as tissue-resident macrophages. It is shown herein that genome modifications, such the combination of modifications that reduce responses by TLRs 2,4,5, are necessary for the production of type I IFN by human antigen-presenting cells.

[0445] Provided are bacteria that contain genome modifications, whereby the response by toll-like receptors (TLRs) 2, 4, and 5 is reduced, compared to the bacteria without the genome modifications. Such modifications include those that result in penta-acylated LPS and elimination of flagella, such as the pagP⁻/msbB⁻ bacteria that lack flagella, and also those that are deficient or do not produce or express asparaginase IL, such as those that are ΔansB. The bacteria also can comprise further genomic modifications such as one or more modifications whereby they are auxotrophic for a required nutrient or for a factor, so that they are unable to replicate in a eukaryotic host, but can replicate in vitro when supplied with the nutrient or factor, such auxotrophic for thymidine (ΔthyA), such as by genome modifications that render them unable to produce or express thymidylate synthase (ΔthyA), or Asd.

[0446] The bacteria that are provided herein that combine some or all of these traits are used to express therapeutic products, including anti-cancer products, and antigens, depending upon their intended use. For administration to subjects with cancer, the bacteria, which accumulate in tumor-resident myeloid cells, encode anti-cancer therapeutics, such as products that result in stimulation of an immune response, and/or that result in inhibiting immunosuppression, or that encode a product that treats the tumor, and those that encode a combination of products that can act synergistically to treat cancer. The bacteria provided herein that accumulate in or infect phagocytic cells, also can be used for subjects that do not have cancer, such as, as vaccines by delivering or encoding an antigen, or delivering RNA. The various embodiments and combinations of properties and products, and uses, are described throughout the disclosure herein.

[0447] In some embodiments, the bacteria comprise a plasmid containing nucleic acid encoding a product, or comprise RNA encoding the product, where the product encoded by the nucleic acid or RNA is an antigenic sequence or sequences from a pathogenic virus, bacterium, parasite, or is a tumor antigen, whereby, upon expression of the encoded antigen in the host, the host develops an immune-protective response or immunizing response against the pathogenic virus, bacterium, parasite, or tumor antigen, or the encoded product is a therapeutic product; expression of the antigenic sequence(s) is/are under control of a prokaryotic promoter so that RNA encoding the antigen(s) is/are produced in the bacteria; nucleic acid encoding the antigen comprises regulatory sequences that inhibit or prevent translation of encoded RNA by bacterial ribosomes, but that does not inhibit or prevent translation of the encoded RNA by eukaryotic host ribosomes, whereby translation is de-coupled from transcription in the bacteria; the resulting bacteria are selective for infecting phagocytic cells when administered to a eukaryotic subject, and deliver the nucleic acid into the phagocytic cells, wherein the RNA is translated.

[0448] The bacteria, which are cultured in vitro to produce the RNA, upon administration, infect the phagocytes and deliver their contents, but they are not viable and/or do not replicate, thereby providing the RNA, such as mRNA, to the host cells, which translate the RNA to produce the encoded product, such as an immunogenic protein or antigen. The RNA generally is mRNA, and also can be other forms of RNA, such as RNAi, or eRNA (circular RNA), and other therapeutic forms. The immunostimulatory bacteria that are used for this purpose can include the plasmids, which encode the RNA, in high or higher (generally 150 or greater) copy numbers, to increase the amount of RNA delivered. Various embodiments are described, claimed, and exemplified herein. The mRNA can encode pathogen proteins, pathogen antigens, tumor-antigens, therapeutic products for treatment of tumors or infections, and combinations thereof. The mRNA can be synthetic, such as those designed for immunization (see, e.g., U.S. Patent Publication No. 2019/0351040, and others that describe mRNA for immunization or treatment). The resulting bacteria are vaccines for therapy or immunization. The payloads can include products that are adjuvants, that are immunostimulatory protein, that induce type I interferon (IFN) to activate T-cells in concert with the immunizing antigen/protein.

[0449] In some embodiments, the immunostimulatory bacteria provided herein contain a plasmid that encodes two or more therapeutic proteins selected from among: a) an immunostimulatory protein that confers or contributes to an anti-tumor immune response in the tumor microenvironment; b) one or more of a protein that is part of a cytosolic DNA/RNA sensor pathway that leads to expression of type I interferon (IFN), or a variant thereof that has increased activity to increase expression of type I IFN, or a variant thereof that results in constitutive expression of a type I IFN; and c) an anti-cancer antibody or antigen-binding portion thereof. For example, the immunostimulatory protein can be a co-stimulatory molecule that is one that lacks a cytoplasmic domain or a sufficient portion thereof, for expression on an antigen-presenting cell (APC), whereby the truncated co-stimulatory molecule is capable of constitutive immunostimulatory signaling to a T-cell through co-stimulatory receptor engagement, and is unable to counter-regulatory signal to the antigen presenting cell (APC). In some embodiments, the immunostimulatory bacteria encode at least two therapeutic products, selected from among a cytokine, a protein that constitutively induces a type I IFN, a co-stimulatory molecule, and an anti-cancer antibody or antigen-binding portion thereof, which can be under control of a single promoter. For example, expression of the nucleic acid encoding at least two or all of the products is under control of a single promoter, and the nucleic acid encoding each product is separated by nucleic acid encoding 2A polypeptides, whereby, upon translation, each product is separately expressed. The nucleic acid encoding each product can be operatively linked to nucleic acid encoding a sequence that directs secretion of the expressed product from a cell.

[0450] Provided are immunostimulatory bacteria that encode two or more therapeutic products, wherein at least one product is selected from a), and at least one is selected from b), and a) is IL-2, IL-7, IL-12p70 (IL-12p40+IL-12p35), IL-15, IL-23, IL-36 gamma, IL-2 that has attenuated binding to IL-2Ra, IL-15/IL-15R alpha chain complex (also referred to herein as IL-15/IL-15Rα, IL-15 complex, or other variations), IL-18, IL-2 that is modified so that it does not bind to IL-2Ra, CXCL9, CXCL10, CXCL11, interferon-α, interferon-β, CCL3, CCL4, CCL5, proteins that are involved in or that effect or potentiate the recruitment and/or persistence of T cells, CD40, CD40 ligand (CD40L), OX40, OX40 ligand (OX40L), 4-1BB, 4-1BB Ligand (4-1BBL), members of the B7-CD28 family, TGF-beta polypeptide antagonists, or members of the tumor necrosis factor receptor (TNFR) superfamily; and b) is STING, RIG-I, MDA-5, IRF-3, IRF-5, IRF-7, TRIM56, RIP1, Sec5, TRAF3, TRAF2, TRAF6, STAT1, LGP2, DDX3, DHX9, DDX1, DDX9, DDX21, DHX15, DHX33, DHX36, DDX60, and SNRNP200. They also can encode one or more of a TGF-beta inhibitory antibody, a TGF-beta binding decoy receptor, an anti-IL6 antibody, or an IL-6 binding decoy receptor.

[0451] Exemplary of combinations of encoded therapeutic products are any of the following combinations of therapeutic products: IL-2 and IL-12p70; IL-2 and IL-21; IL-2, IL-12p70, and a STING GOF variant; IL-2, IL-21, and a STING GOF variant; IL-2, IL-12p70, a STING GOF variant, and 4-1BBL (including 4-1BBLΔcyt), where Δcyt is a deleted cytoplasmic domain; IL-2, IL-21, a STING GOF variant, and 4-1BBL (including 4-1BBLΔcyt); IL-15/IL-15Rα, and a STING GOF variant; IL-15/IL-15Rα, a STING GOF variant, and 4-1BBL (including 4-1BBLΔcyt); IL-15/IL-15Rα and IL-12p70; IL-15/IL-15Rα and IL-21; IL-15/IL-15Rα, IL-12p70, and a STING GOF variant; IL-15/IL-15Rα, IL-21, and a STING GOF variant; IL-15/IL-15Rα, IL-12p70, a STING GOF variant, and 4-1BBL (including 4-1BBLΔcyt); IL-15/IL-15Rα, IL-21, a STING GOF variant, and 4-1BBL (including 4-1BBLΔcyt); IL-12p70 and IL-21; IL-12p70, IL-21, and a STING GOF variant; IL-12p70, IL-21, a STING GOF variant, and 4-1BBL (including 4-1BBLΔcyt); IL-12p70 and a STING GOF variant; IL-12p70, a STING GOF variant, and 4-1BBL (including 4-1BBLΔcyt); IL-12p70 and IL-18; IL-12p70, IL-18, and a STING GOF variant; IL-12p70, IL-18, a STING GOF variant, and 4-1BBL (including 4-1BBLΔcyt); a TGF-β decoy receptor, IL-2, and IL-12p70; a TGF-β decoy receptor, IL-2, and IL-21; a TGF-β decoy receptor, IL-2, IL-12p70, and a STING GOF variant; a TGF-β decoy receptor, IL-2, IL-21, and a STING GOF variant; a TGF-β decoy receptor, IL-2, IL-12p70, a STING GOF variant, and 4-1BBL (including 4-1BBLΔcyt); a TGF-β decoy receptor, IL-2, IL-21, a STING GOF variant, and 4-1BBL (including 4-1BBLΔcyt); a TGF-β decoy receptor, IL-15/IL-15Rα, and a STING GOF variant; a TGF-β decoy receptor, IL-15/IL-15Rα, a STING GOF variant, and 4-1BBL (including 4-1BBLΔcyt); a TGF-β decoy receptor, IL-15/IL-15Rα, and IL-12p70; a TGF-β decoy receptor, IL-15/IL-15Rα, and IL-21; a TGF-β decoy receptor, IL-15/IL-15Rα, IL-12p70, and a STING GOF variant; a TGF-β decoy receptor, IL-15/IL-15Rα, IL-21, and a STING GOF variant; a TGF-β decoy receptor, IL-15/IL-15Rα, IL-12p70, a STING GOF variant, and 4-1BBL (including 4-1BBLΔcyt); a TGF-β decoy receptor, IL-15/IL-15Rα, IL-21, a STING GOF variant and, 4-1BBL (including 4-1BBLΔcyt); a TGF-β decoy receptor, IL-12p70, and IL-21; a TGF-β decoy receptor, IL-12p70, IL-21, and a STING GOF variant; a TGF-β decoy receptor, IL-12p70, IL-21, a STING GOF variant, and 4-1BBL (including 4-1BBLΔcyt); a TGF-β decoy receptor and IL-12p70; a TGF-β decoy receptor, IL-12p70, and a STING GOF variant; a TGF-β decoy receptor, IL-12p70, a STING GOF variant, and 4-1BBL (including 4-1BBLΔcyt); a TGF-β decoy receptor, IL-12p70, and IL-18; a TGF-β decoy receptor, IL-12p70, IL-18, and a STING GOF variant; a TGF-β decoy receptor, IL-12p70, IL-18, a STING GOF variant, and 4-1BBL (including 4-1BBLΔcyt); a TGF-β decoy receptor and a STING GOF variant; an anti-CTLA-4 antibody, IL-2, and IL-12p70; an anti-CTLA-4 antibody, IL-2, and IL-21; an anti-CTLA-4 antibody, IL-2, IL-12p70, and a STING GOF variant; an anti-CTLA-4 antibody, IL-2, IL-21, and a STING GOF variant; an anti-CTLA-4 antibody, IL-2, IL-12p70, a STING GOF variant, and 4-1BBL (including 4-1BBLΔcyt); an anti-CTLA-4 antibody, IL-2, IL-21, a STING GOF variant, and 4-1BBL (including 4-1BBLΔcyt); an anti-CTLA-4 antibody, IL-15/IL-15Rα, and a STING GOF variant; an anti-CTLA-4 antibody, IL-15/IL-15Rα, a STING GOF variant, and 4-1BBL (including 4-1BBLΔcyt); an anti-CTLA-4 antibody, IL-15/IL-15Rα, and IL-12p70; an anti-CTLA-4 antibody, IL-15/IL-15Rα, and IL-21; an anti-CTLA-4 antibody, IL-15/IL-15Rα, IL-12p70, and a STING GOF variant; an anti-CTLA-4 antibody, IL-15/IL-15Rα, IL-21, and a STING GOF variant; an anti-CTLA-4 antibody, IL-15/IL-15Rα, IL-12p70, a STING GOF variant, and 4-1BBL (including 4-1BBLΔcyt); an anti-CTLA-4 antibody, IL-15/IL-15Rα, IL-21, a STING GOF variant, and 4-1BBL (including 4-1BBLΔcyt); an anti-CTLA-4 antibody, IL-12p70, and IL-21; an anti-CTLA-4 antibody, IL-12p70, IL-21, and a STING GOF variant; an anti-CTLA-4 antibody, IL-12p70, IL-21, a STING GOF variant, and 4-1BBL (including 4-1BBLΔcyt); an anti-CTLA-4 antibody and IL-12p70; an anti-CTLA-4 antibody, IL-12p70, and a STING GOF variant; an anti-CTLA-4 antibody, IL-12p70, a STING GOF variant, and 4-1BBL (including 4-1BBLΔcyt); an anti-CTLA-4 antibody, IL-12p70, and IL-18; an anti-CTLA-4 antibody, IL-12p70, IL-18, and a STING GOF variant; an anti-CTLA-4 antibody, IL-12p70, IL-18, a STING GOF variant, and 4-1BBL (including 4-1BBLΔcyt); an anti-CTLA-4 antibody and a STING GOF variant; a CD40 agonist, IL-2, and IL-12p70; a CD40 agonist, IL-2, and IL-21; a CD40 agonist, IL-2, IL-12p70, and a STING GOF variant; a CD40 agonist, IL-2, IL-21, and a STING GOF variant; a CD40 agonist, IL-2, IL-12p70, a STING GOF variant, and 4-1BBL (including 4-1BBLΔcyt); a CD40 agonist, IL-2, IL-21, a STING GOF variant, and 4-1BBL (including 4-1BBLΔcyt); a CD40 agonist, IL-15/IL-15Rα, and a STING GOF variant; a CD40 agonist, IL-15/IL-15Rα, a STING GOF variant, and 4-1BBL (including 4-1BBLΔcyt); a CD40 agonist, IL-15/IL-15Rα, and IL-12p70; a CD40 agonist, IL-15/IL-15Rα, and IL-21; a CD40 agonist, IL-15/IL-15Rα, IL-12p70, and a STING GOF variant; a CD40 agonist, IL-15/IL-15Rα, IL-21, and a STING GOF variant; a CD40 agonist, IL-15/IL-15Rα, IL-12p70, a STING GOF variant, and 4-1BBL (including 4-1BBLΔcyt); a CD40 agonist, IL-15/IL-15Rα, IL-21, a STING GOF variant, and 4-1BBL (including 4-1BBLΔcyt); a CD40 agonist, IL-12p70, and IL-21; a CD40 agonist, IL-12p70, IL-21, and a STING GOF variant; a CD40 agonist, IL-12p70, IL-21, a STING GOF variant, and 4-1BBL (including 4-1BBLΔcyt); a CD40 agonist and IL-12p70; a CD40 agonist, IL-12p70, and a STING GOF variant; a CD40 agonist, IL-12p70, a STING GOF variant, and 4-1BBL (including 4-1BBLΔcyt); a CD40 agonist, IL-12p70, and IL-18; a CD40 agonist, IL-12p70, IL-18, and a STING GOF variant; a CD40 agonist, IL-12p70, IL-18, a STING GOF variant, and 4-1BBL (including 4-1BBLΔcyt); and a CD40 agonist and a STING GOF variant.

[0452] Other combinations of products include, for example, IL-15 and a STING gain-of-function variant, including STING chimeras with a gain-of-function mutation or mutations, as provided herein, or IL-15Rα-IL-15sc and a STING gain-of-function variant, including STING chimeras with a gain-of-function mutation or mutations. Other products or combinations thereof include a bi-specific T-cell engager (BiTe®); a BiTe® and a STING protein, such as a modified GOF STING protein or a STING chimera, as described herein; a BiTe® and IL-15; a BiTe® and IL-15Rα-IL-15sc; a BiTe®, IL-15 and a STING protein, such as a modified GOF STING protein or chimeric STING protein; and a BiTe®, IL-15Rα-IL-15sc, and a STING protein, such as a modified GOF STING protein or chimeric STING protein, where the BiTe® targets include, for example, DLL3, EGFR, Her2, CEA, Mesothelin, PSMA, EpCAM, CD74, Folate Receptor, Nectin4, EphA2, CA-IX, B7H3, Siglec-15, Muc1, Lewis Y antigen, and other such tumor antigens/tumor targets.

[0453] Also provided are therapeutic compositions containing a tumor antigen(s) and a STING gain-of-function variant or STING chimera; a therapeutic composition of a tumor antigen(s) and IL-15; a therapeutic composition of a tumor antigen(s) and IL-15Rα-IL-15sc; a therapeutic composition of a tumor antigen(s), IL-15, and a STING gain-of-function variant or STING chimera; and a therapeutic composition of a tumor antigen(s), IL-15Rα-IL-15sc, and a STING gain-of-function variant or STING chimera. These products can be encoded in the immunostimulatory bacteria. The tumor antigens can be any listed or described herein (for example, in Example 35), or known in the art.

[0454] Combinations of products also include combinations of antigens and immune stimulating proteins. The antigens can be tumor antigens, or they can be immunizing antigens, such as pathogenic antigens, where the pathogens include, for example, bacteria, protozoans, viruses, and prions, and other prion-like particles that cause diseases and disorders. The antigens include any described or listed herein, or known in the art. The combinations include, for example, combinations of one or more antigens and IFNα2; one or more antigens and IFN-β; one or more antigens, IFNα2, and IFN-β; one or more antigens and an IRF3 GOF variant with the mutation S396D; and one or more antigens, IFNα2, and an IRF3 GOF variant with the mutation S396D. Other products and combinations of products that are encoded in the immunostimulatory bacteria provided herein, include, but are not limited to, the combination of IFNα2 and an IRF3 GOF variant with the mutation S396D; IFNα2 and IFN-β; FLT-3L (FMS-like tyrosine kinase 3 ligand; see, e.g., SEQ ID NO:436); sialidase (see, e.g., SEQ ID NO:435); the IL-12 p35 subunit of IL-12p70 only; Azurin; a membrane anchored/tethered cytokine or molecule, such as, for example, IL-2, IL-12, IL-12p35, IL-21, IL-15, IL-15Rα-IL-15sc, or FLT-3L; or a TLR8 agonist, such as, for example, where the TL38 agonist is polyU or polyU/G, a microRNA, or is miR-21.

[0455] Also provided are modified non-human Stimulator of Interferon Genes (STING) proteins, and STING protein chimeras, as well as delivery vehicles, including any described herein, pharmaceutical compositions, cells encoding or containing these STING proteins, and uses thereof, and methods of treatment of cancers. In particular, the immunostimulatory bacteria provided herein encode the modified non-human STING proteins, non-human STING proteins, and STING chimeras, as described herein. These STING proteins that are encoded by the immunostimulatory bacteria are provided herein and described throughout.

[0456] Provided herein are modified non-human STING proteins, where the non-human STING protein is one that has lower NF-κB activation than the human STING protein, and, optionally, higher type I interferon activation activity compared to the wild-type (WT) human STING protein. These non-human STING proteins are modified to include a mutation or mutations so that they have increased activity, or act constitutively, in the absence of cytosolic nucleic acid signaling. The mutations are typically amino acid mutations that occur in interferonopathies in humans, such as those described above for human STING. The corresponding mutations are introduced into the non-human species STING proteins, where corresponding amino acid residues are identified by alignment. Also, in some embodiments, the TRAF6 binding site in the C-terminal tail (CTT) of the STING protein is deleted, reducing NF-κB signaling activity.

[0457] Provided are modified STING proteins, particularly human STING proteins, that are chimeras, in which the CTT (C-terminal tail) region in the STING protein from one species, such as human, is replaced with the CTT from a STING protein of another species that has lower NF-κB signaling activity and/or higher type I IFN signaling activity than human STING. Also, the TRAF6 binding site is optionally deleted in these chimeras.

[0458] The modified STING proteins also include the mutations as set forth throughout the disclosure herein.

[0459] Also provided are delivery vehicles, such as immunostimulatory bacteria, and any provided herein or known to those of skill in the art, including, for example, exosomes, nanoparticles, minicells, cells, liposomes, lysosomes, oncolytic viruses, and other viral vectors, that encode the modified STING proteins of any of 1-3. Also provided are delivery vehicles, such as immunostimulatory bacteria, any provided herein or known to those of skill in the art, including, for example, exosomes, nanoparticles, minicells, cells, liposomes, lysosomes, oncolytic viruses, and other viral vectors, that encode unmodified STING from a non-human species whose STING protein has reduced NF-κB signaling activity compared to that of human STING, and optionally, increased type I interferon stimulating/signaling activity compared to that of human STING.

[0460] Also provided are cells (non-zygotes, if human), such as cells used for cell therapy, such as T-cells and stem cells, and cells used to produce the STING proteins as described herein. Also provided are pharmaceutical compositions that contain the STING proteins, or the delivery vehicles, or the cells, or combinations thereof.

[0461] Uses and methods of treatment of cancer and vaccination against pathogens or cancer by administering any the immunostimulatory bacteria as described herein are provided.

[0462] Assays and methods to assess NF-κB activity (signaling activity), and type I interferon stimulating activity or interferon-β stimulating activity of STING are described herein, and also, are known to those of skill in the art. Methods include those described, for example, in de Oliveira Mann et al. (2019) Cell Reports 27:1165-1175, which describes, inter alia, the interferon-β and NF-κB signaling activities of STING proteins from various species, including human, thereby identifying STING proteins from various species that have lower NF-κB activity than human STING, and those that also have comparable or higher interferon-β activity than human STING. de Oliveira Mann et al. (2019) provides species alignments and identifies domains of STING in each species, including the CTT domain (see, also, the Supplemental Information for de Oliveira Mann et al. (2019)).

[0463] The non-human STING proteins can be, but are not limited to, STING proteins from the following species: Tasmanian devil (Sarcophilus harrisii; SEQ ID NO:349), marmoset (Callithrix jacchus; SEQ ID NO:359), cattle (Bos taurus; SEQ ID NO:360), cat (Felis catus; SEQ ID NO:356), ostrich (Struthio camelus australis; SEQ ID NO:361), crested ibis (Nipponia nippon; SEQ ID NO:362), coelacanth (Latimeria chalumnae; SEQ ID NOs:363-364), boar (Sus scrofa; SEQ ID NO:365), bat (Rousettus aegyptiacus; SEQ ID NO:366), manatee (Trichechus manatus latirostris; SEQ ID NO:367), ghost shark (Callorhinchus milii; SEQ ID NO:368), and mouse (Mus musculus; SEQ ID NO:369). These vertebrate STING proteins readily activate immune signaling in human cells, indicating that the molecular mechanism of STING signaling is shared in vertebrates (see, de Oliveira Mann et al. (2019) Cell Reports 27:1165-1175).

[0464] It is shown herein that the immunostimulatory bacteria provided herein, by virtue of the ability to infect myeloid cells, such as tumor-resident and tissue-resident macrophages, and the ability to retain viability for at least a limited time, and/or to deliver plasmids that encode therapeutic products that result in expression of type I IFN and/or other immune-stimulating products, such as gain-of-function (GOF) variants that do not require cytosolic nucleic acids, nucleotides, dinucleotides, or cyclic dinucleotides (CDNs) to result in expression of type I IFN, can convert macrophages that have the M2 phenotype into M1 or M1-like macrophages, with immunosuppressive properties reduced or eliminated, and immune-stimulating, anti-tumor or anti-viral properties enhanced or added. Provided are immunostimulatory bacteria that contain a plasmid encoding a therapeutic product, where infection of a macrophage, including human macrophages, by the bacterium, converts an M2 macrophage to an M1 phenotype or M1-like phenotype macrophage. Provided are immunostimulatory bacteria that contain a plasmid encoding a therapeutic product whose expression in a macrophage results in the conversion of, or converts, M2 macrophages, such as human M2 macrophages, to an M1 or M1-like phenotype. The immunostimulatory bacteria with such properties include any of the bacteria provided herein that contain genome modifications that result in infection of tumor-resident (in subjects with cancer), and tissue-resident myeloid cells. These genome modifications include those that result in a lack of flagella, wherein the wild-type bacterium has flagella, and others, such as those that result in bacteria that are pagP⁻/msbB⁻. Other modifications include those that result in the elimination of asparaginase activity, such as modifications that result in bacteria that are ansB⁻, in the bacteria that infect myeloid cells, which thereby enhances T-cell activities, and other modifications that alter the lipopolysaccharide (LPS). These immunostimulatory bacteria provided herein convert immunosuppressive phagocytic macrophages to immunostimulatory, phagocytic macrophages that are capable of in situ antigen cross-presentation to CD8+ T-cells, and of migration to lymph nodes to prime CD4+ and CD8+ T-cells.

[0465] Included are immunostimulatory bacteria that encode therapeutic products in macrophages, that facilitate or result in the conversion of, or that convert, M2 macrophages to an M1 or M1-like phenotype, which has a profile of some or all characteristics of M1 macrophage. Exemplary of the therapeutic products are those that are part of a cytosolic DNA/RNA sensor pathway that leads to expression of type I interferon (IFN), particularly constitutive expression. This includes the gain-of-function (GOF) variants of therapeutic products that are part of the cytosolic DNA/RNA sensor pathway, and that do not require cytosolic nucleic acids, nucleotides, dinucleotides, or cyclic dinucleotides (CDNs) to result in expression of type I IFN, such as the variant and non-human STING proteins, STING chimeras, and STING chimeras with gain-of-function mutations, as described and provided herein. The bacteria include any that can be modified as described herein, including the species listed herein, such as Salmonella species and strains.

[0466] Also provided are immunostimulatory bacteria that contain nucleic acid operatively linked to a prokaryotic promoter, where: the nucleic acid comprises RNA that lacks sequences necessary for translation by a prokaryotic cell, whereby the RNA is produced in the bacterium, but is not translated into protein. For example, the RNA lacks a Shine-Dalgarno sequence, and comprises an Internal Ribosome Entry Site (IRES) and/or a translational read-through 2A peptide. The IRES sequence prevents translation by prokaryotic ribosomes, but provides for translation by eukaryotic ribosomes. The bacteria include immunostimulatory bacteria in which the 2A peptide is one or more of T2A, P2A, E2A, or F2A, to produce discrete products from polycistronic constructs.

[0467] Also provided are immunostimulatory bacteria as described herein that can be a delivery vehicle for delivering RNA to eukaryotic cells, such as myeloid cells. These bacteria include nucleic acid operatively linked to a prokaryotic promoter, where: the nucleic acid and prokaryotic promoter generally are encoded on a plasmid, but in some embodiments, are encoded in the bacterial genome; the nucleic acid comprises RNA that lacks sequences necessary for translation by the bacterial ribosomes, whereby the RNA is produced in the bacterium, and where: the RNA lacks a Shine-Dalgarno sequence, and comprises an Internal Ribosome Entry Sequence (IRES), or a translational read-through 2A peptide. The prokaryotic promoter, when operatively linked to nucleic acid encoding a therapeutic protein (or non-bacterial protein), can be a bacterial promoter or a phage promoter, such as a bacteriophage promoter. The RNA polymerase that recognizes the phage promoter can be encoded in the bacterial genome, or on a plasmid for expression in the bacteria. Exemplary prokaryotic promoters include any known to those of skill in the art, including, but not limited to, those that comprise all or a sufficient portion of (sufficient to initiate transcription of an operatively linked nucleic acid) the promoters whose sequences are set forth in any of SEQ ID NOs: 393-396, respectively:

(SEQ ID NO: 393)
attatgtcttgacatgtagtgagtgggctggtataatgcagcaag,
(SEQ ID NO: 394)
ttatgcttgacgctgcgtaaggtttttgttataatacaccaag,
or
(SEQ ID NO: 395)
attatgtcttgacatgtagtgagtgggctggtaaatgcagcaag,
or
(Salmonella rpsM promoter; SEQ ID NO: 396)
gatcccggagttcatgcgtgatgcaatgaaagtgccgttctactt
cggtgggacctcactgcttatcgttgttgtcgtgattatggactt
tatggctcaagtgcaaactctgatgatgtccagtcagtatgagtc
tgcattgaagaaggcgaacctgaaaggctacggccgttaattggt
cgcctgagaagttacggagagtaaaaatgaaagttcgtgcttccg
tcaagaaattatgccgtaactgcaaaatcgttaagcgtgatggtg
tcatccgtgtgatttgcagtgccgagccgaagcataaacagcgcc
aaggctgattttttcgcatatttttcttgcaaagttgggttgagc
tggctagattagccagccaatcttttgtatgtctgtacgtttcca
tttgagtatcctgaaaacgggcttttcagcatggtacgtacatat
taaatagtaggagtgcatagtggcccgtatagcaggcattaacat
tcctgatcagaaacacgccgtgatcgcgttaacttcgatctacgg
tgtcggcaagacccgttctaaagccatcctggctgcagcgggtat
cgctgaaaatgttaagatcctctagatttaagaaggagatataca
t.

These immunostimulatory bacteria comprise genomic modifications, as described herein, whereby the bacteria infect tissue-resident myeloid cells, and/or tumor-resident myeloid cells, or, in subjects that do not have tumors, in phagocytic cells, such as macrophages. The bacteria infect the cells and deliver the RNA, which is translated in the eukaryotic host cell. Exemplary of such bacteria, are those that are modified to lack flagella, such as by deletion or disruption of the genes involved in producing flagella. The bacteria are species and strains that, without the genomic modifications, have flagella.

[0468] Also provided are immunostimulatory bacteria in which an encoded therapeutic product, such as a protein, is linked to a moiety that confers an improved pharmacological property, such as a pharmacokinetic or pharmacodynamic property, such as increased serum half-life. Hence, provided are immunostimulatory bacteria, where an encoded therapeutic product comprises an Fc domain, or a half-life extending moiety, such as human serum albumin, or a portion thereof. Half-life extension modalities or methods, include, for example, PEGylation, modification of glycosylation, sialylation, PASylation (modification with polymers of PAS amino acids that are about 100-200 residues in length), ELPylation (see, e.g., Floss et al. (2010) Trends Biotechnol. 28(1):37-45), HAPylation (modification with a glycine homopolymer), fusion to human serum albumin, fusion to GLK, fusion to CTP, GLP fusion, fusion to the constant fragment (Fc) domain of a human immunoglobulin (IgG), fusion to transferrin, fusion to non-structured polypeptides, such as XTEN (also referred to as rPEG, which is a genetic fusion of non-exact repeat peptide sequences, containing A, E, G, P, S, and T; see, e.g., Schellenberger et al. (2009) Nat. Biotechnol. 27(12):1186-1190), and other such modifications and fusions that increase the size, increase the hydrodynamic radius, alter the charge, or target to receptors for recycling rather than clearance, and combinations of such modifications and fusions.

[0469] Also provided are immunostimulatory bacteria, where the encoded therapeutic product comprises the B7 protein transmembrane domain, or where the therapeutic product is GPI-anchored by virtue of an endogenous or added GPI anchor. The encoded therapeutic product can comprise a fusion to collagen.

[0470] The immunostimulatory bacteria in any and all embodiments can be any suitable species. Where reference is made to particular genes and gene modifications, the genes and modifications are those that correspond to the genes and modifications referenced with respect to Salmonella, as an exemplary species. Species and strains include, for example, a strain of Rickettsia, Klebsiella, Bordetella, Neisseria, Aeromonas, Francisella, Corynebacterium, Citrobacter, Chlamydia, Haemophilus, Brucella, Mycobacterium, Mycoplasma, Legionella, Rhodococcus, Pseudomonas, Helicobacter, Vibrio, Bacillus, and Erysipelothrix. For example, Rickettsia rickettsiae, Rickettsia prowazekii, Rickettsia tsutsugamuchi, Rickettsia mooseri, Rickettsia sibirica, Bordetella bronchiseptica, Neisseria meningitidis, Neisseria gonorrhoeae, Aeromonas eucrenophila, Aeromonas salmonicida, Francisella tularensis, Corynebacterium pseudotuberculosis, Citrobacter freundii, Chlamydia pneumoniae, Haemophilus somnus, Brucella abortus, Mycobacterium intracellulare, Legionella pneumophila, Rhodococcus equi, Pseudomonas aeruginosa, Helicobacter mustelae, Vibrio cholerae, Bacillus subtilis, Erysipelothrix rhusiopathiae, Yersinia enterocolitica, Rochalimaea quintana, and Agrobacterium tumerfacium.

[0471] Provided herein are genome modified bacteria, comprising genome modifications, whereby TLR2, TLR4, and TLR5 signaling is reduced compared to the bacteria without the genome modifications, wherein:
[0472] the bacteria comprise further genomic modifications whereby they are auxotrophic for a required nutrient or factor so that they are unable to replicate in a eukaryotic host, but can replicate in vitro when supplied with the nutrient or factor;
[0473] the bacteria comprise a plasmid containing nucleic acid, or comprise RNA encoding an antigenic sequence or sequences from a pathogenic virus, bacterium, or parasite, or encoding a tumor antigen, whereby, upon expression of the encoded antigen in the host, the host develops an immmunoprotective response against the pathogenic virus, bacterium, or parasite;
[0474] expression of the antigenic sequence(s) is/are under control of a prokaryotic promoter so that RNA encoding the antigen(s) is produced in the bacteria;
[0475] nucleic acid encoding the antigen comprises regulatory sequences that inhibit or prevent translation of encoded RNA by bacterial ribosomes, but that does not inhibit or prevent translation of the encoded RNA by eukaryotic host ribosomes, whereby translation is de-coupled from transcription in the bacteria;
[0476] the resulting bacteria infect phagocytic cells when administered to a eukaryotic subject, and deliver the nucleic acid into the phagocytic cells, wherein the RNA is translated.

[0477] The nucleic acid encoding the antigenic sequence(s) can comprise an internal ribosomal entry site (IRES) sequence, whereby host cell translation is facilitated or enhanced and bacterial translation is inhibited or prevented. The IRES can be Vascular Endothelial Growth Factor and Type 1 Collagen Inducible Protein (VCIP; see, e.g., SEQ ID NO:434), and the nucleic acid encoding the antigen(s) can comprise a VCIP IRES or other IRES that inhibits bacterial translation. The IRES or the VCIP IRES can be included in the plasmid, at a position that is 3′ of the promoter and 5′ of the antigen(s) coding sequence.

[0478] The pathogen can be a bacterium or a virus, or the encoded antigen can be a tumor antigen. The immunostimulatory bacteria provided herein can be vaccines to prevent or treat a viral infection or a bacterial infection, including chronic viral infections, and acute infections. The infection can be from an infection by hepatitis viruses, herpesviruses, varicella zoster virus (VZV), Epstein-Barr virus, human immunodeficiency virus (HIV), human T-cell leukemia virus (HTLV), Respiratory Syncytial Virus (RSV), measles virus, and other viruses that chronically infect subjects. The infectious agent can be Severe Acute Respiratory Syndrome coronavirus (SARS-CoV), Middle East Respiratory Syndrome coronavirus (MERS-CoV), or Severe Acute Respiratory Syndrome coronavirus 2 (SARS-CoV-2, which causes COVID-19).

[0479] The pathogen can be a species of Escherichia, Staphylococcus, Pseudomonas, or Porphyromonas, or the pathogen can be P. gingivalis, SARS-CoV, or E. coli.

[0480] The plasmid in these immunostimulatory bacteria can further encode an immunostimulatory protein or other adjuvant, or can encode a combination of immunostimulatory proteins or other therapeutic proteins. The immunostimulatory protein can be a STING protein, such as one that comprises a gain-of-function mutation, or one that is a chimeric STING protein. The bacteria can comprise a plasmid that encodes a combination of therapeutic products. The immunostimulatory protein(s) and/or other therapeutic proteins can be encoded on the plasmid as part of a polycistronic sequence, with the antigen under the control of a prokaryotic promoter recognized by the bacteria; or the immunostimulatory protein(s) and/or other therapeutic proteins can be encoded on the plasmid under control of a eukaryotic promoter recognized by the eukaryotic host. The prokaryotic promoter can be a bacterial promoter or a bacterial phage promoter, and the eukaryotic host can be a human.

[0481] The immunostimulatory bacteria can comprise mRNA encoding the antigen(s), and any other proteins expressed under control of a prokaryotic promoter, that are produced by culturing the bacterium in vitro. The immunostimulatory bacteria can comprise genome modifications whereby the bacteria lack flagella and produce LPS with pent-acylated, and/or the bacteria can be asd⁻, and/or an adenosine auxotroph, and/or csgD⁻ and/or ansB⁻.

[0482] The bacteria can comprise nucleic acid encoding a TLR8 agonist.

[0483] The bacteria can be msbB⁻/pagP⁻, and/or can lack flagella, and/or can be asd⁻.

[0484] The bacteria can be a species or strain of Escherichia, Listeria, or Salmonella. For example, the bacteria can be Salmonella typhimurium strains, and the unmodified Salmonella strain is a wild-type strain, or is an attenuated strain. The immunostimulatory bacteria can be derived from strain AST-100 (VNP20009 or YS1646), or from strain ATCC 14028, or from a strain having all of the identifying characteristics of strain ATCC 14028.

[0485] As described herein, the immunostimulatory bacteria can contain one or more genome modification that are one or more of a deletion, insertion, disruption, and other modification in a gene, whereby the product encoded by the gene is not produced or, as produced, is inactive.

[0486] Also provided herein are pharmaceutical compositions, comprising any of the immunostimulatory bacteria described or provided herein, in a pharmaceutically acceptable vehicle. The pharmaceutical composition can be formulated as a vaccine, for example, as a liquid, a powder, or a tablet. Also provided are methods and uses of the bacteria or pharmaceutical compositions for treating or prevent (reducing the risk of developing) a disease or condition or infection or cancer, as well as uses of the bacteria for delivering RNA, such as mRNA, and methods of delivering the RNA to a subject, comprising administering the bacteria herein.

[0487] Also provided are bacteria comprising a plasmid encoding a product or products, where the product(s) is/are a therapeutic product(s), and the plasmid in the bacterium encodes the product(s) to produce mRNA that is not translated by the bacterium.

[0488] The bacteria can be attenuated, or rendered of low toxicity or non-toxic, by virtue of the modifications described herein. Exemplary of bacteria are species of Salmonella, such as a Salmonella typhimurium strain. The immunostimulatory bacteria provided herein include those that endogenously encode and express, or are modified to encode and express, a gene encoding resistance to complement killing (rck), such as a Salmonella rck gene. For example, therapeutic E. coli are modified to encode rck so that they can be administered systemically.

### Protocols, Methods, and Uses of the Therapeutics Provided Herein

[0489] Provided are immunostimulatory bacteria that, upon administration, convert an immune desert or immune excluded tumor into a hot tumor, where:
[0490] the bacterium comprises genome modifications whereby the bacterium has attenuated TLR2, or attenuated TLR2 and/or TLR4 and/or TLR5 activity, whereby the bacterium, upon administration to a subject, does not produce or produces less of an inflammatory response in the subject to thereby have lower toxicity and higher colonization of tumors compared to a bacterium that does not comprise the genome modifications;
[0491] the bacterium comprises a plasmid that encodes an immunostimulatory protein that a type I interferon (IFN) or encodes two or more type I interferons (IFNs) or encodes one or more type I interferon (IFN) and another immunostimulatory protein and/or a tumor-associated antigen; and
[0492] a hot tumor is responsive to immunotherapy or is more responsive than prior to treatment with the immunostimulatory bacterium.

[0493] Exemplary of such immunostimulatory bacteria is a strain designated as YS1646Δasd/ΔFLG/ΔpagP/ΔansB/ΔcsgD/F-ΔpurI, or YS1646Δasd/ΔFLG/ΔpagP/ΔansB/ΔcsgD/F-ΔpurI/ΔthyA, or YS1646Δasd/ΔFLG/ΔpagP/ΔansB/ΔcsgD/ΔpurI, or other strains that are pagP⁻/msbB⁻, lack curli fimbriae, and are adenosine auxotrophs.

[0494] The plasmids in these bacteria encode immunostimulatory bacterium, such as a type I interferon (IFN), such as an IFN-α and/or an IFN-b. The nucleic acid encoding the IFN or IFNs is operatively linked to eukaryotic regulatory sequences. Exemplary promoters and regulatory sequences are well-known to those of skill in the art, such as, where the regulatory sequences comprise an RNA polymerase type II promoter, such as an inducible or constative promoter, and optionally an enhancer, such as where the promoter and enhancer are of viral origin, which is optionally a cytomegalovirus promoter and/or enhancer. The immunostimulatory bacteria can encode at least two immunostimulatory proteins. They can be encoded so that they are transcribed as a polycistronic message that, upon translation results, in the at least to proteins, such as by including a 2A protein or other such regulatory protein or sequence that results in the at least two proteins when transcribed by eukaryotic ribosomes. Where the immunostimulatory bacterium comprises a plasmid that encodes a type I interferon (IFN) or a plurality thereof. Exemplary of type I interferons are those having a sequence of amino acids set forth in SEQ ID NOs:550, 552, 549 and 551, and allelic variants or other variants thereof having at least 95% or 98% sequence identity and that have interferon activity. Exemplary sequences are set forth in SEQ ID NOs:549 and 551, which set forth the nucleotide sequence of human IFNa2 and human IFN-b, respectively. SEQ ID NOs:550 and 552 set forth the amino acid sequence of human IFNa2 and human IFN-b, respectively.

[0495] The methods, therapeutics, protocols and uses, and immunostimulatory bacterium described herein, including above, can comprise a plasmid that comprises the sequence of nucleotides set forth as SEQ ID NOs:502-545 and degenerate sequences thereof or comprising a portion thereof that comprises nucleic acid encoding the immunostimulatory protein(s), eukaryotic transcription and/or translational regulatory sequences, or sequences having at least 95% sequence identity with the coding portions and regulatory regions of SEQ ID NOs:502-545. Provided are methods for assessing whether a treatment with a delivery vehicle that is targeted to or phagocytosed by macrophages and that encodes a therapeutic product or products will be effective for treating a tumor in a subject. These methods include identifying proliferating macrophages in a tumor biopsy or tumor sample. The delivery vehicle encodes nucleic acid that is transcribed in the nucleus of a macrophage and is not integrated into a chromosome in the genome (is non-integrating). Delivery vehicles include immunostimulatory bacteria, such any of those provided herein that infect or are phagocytosed by macrophages. It is shown herein that expression of encoded payloads occurs in proliferating macrophages. The proliferating macrophages can be identified by any method known in the art, including methods described herein, where proliferating macrophages are identified in the biopsy by any of the following markers:
[0496] Tumor gene expression of G2M module (>14 genes of the set), Stathmin1 (STMN1);
[0497] Biopsy surface markers: CD68+KI67 and/or PCNA, MERTK;
[0498] SPP1 in some tumor types: lung, gastric; and/or
[0499] C1QC in some tumor types: colon and breast.
   For example, the proliferating macrophages have a hybrid SPP1+ and C1QC+(expression of both SPP1 and C1QC) macrophage phenotype, and exhibit enhanced phagocytic and proliferating properties.

[0500] Also provided are methods for rendering a tumor responsive to immunotherapy, comprising administering a therapeutic that converts macrophages to the M1/M2 hybrid phenotype, wherein the macrophage have been identified as proliferating macrophage. Delivery vehicles and therapeutics that effect such conversion are described throughout the disclosure herein. The resulting macrophages that have a hybrid M1/M2 phenotype have a hybrid SPP1+ and C1QC+(expression of both SPP1 and C1QC) macrophage phenotype, whereby the macrophage have enhanced phagocytic and proliferating properties.

[0501] Provided are plasmids that comprise the sequence of nucleotides set forth in SEQ ID NO:501, or degenerative codons thereof in the protein encoding regions, or a sequence having at least 75%, 80%, 90%, 95%, 96%, 97%, 98%, 99%, or more sequence identity to the sequence set forth in SEQ ID NO:501, where the plasmid encodes a protein that is an IL-15/IL-15R alpha chain complex or a protein having at least 95% sequence identity thereto; and encodes a chimeric STING that constitutively induces type 1 interferon activity and has lower NF-κB signaling activity compared to human STING, and encoding a protein having the activity of IL-15 receptor complex and a protein that is a STING protein that has constitutive activity and lower NF-κB signaling activity compared to human STING. Provided are immunostimulatory bacteria that comprise the plasmid, including those that have the phenotype YS1646Δasd/ΔFLG/ΔpagP/ΔansB/ΔcsgD/F-ΔpurI or YS1646Δasd/ΔFLG/ΔpagP/ΔansB/ΔcsgD, where YS1646 is ΔmsbB/ΔpurI; and F-ΔpurI denotes strains in which purI is deleted. The bacteria additionally include those that are thyA⁻ as described herein. Genome modifications in all embodiments comprise those that render a product or locus inactive, such as by insertion, deletion, transposition, and/or any other change such the encoded active product is not produced.

[0502] Provided are immunostimulatory bacteria that comprise a plasmid encoding an IL-15, such as IL-15/IL-15R alpha chain complex, and encoded a constitutive STING, wherein the plasmid encoding the IL-15/IL-15R alpha chain complex and constitutive STING comprises the sequence set forth in SEQ ID NO:501 or a portion thereof encoding the IL-15 and eSTING or degenerates thereof or variants thereof having at least 95% sequence identity to the portion or SEQ ID NO:501 or to degenerates thereof. The immunostimulatory bacterium can be a Salmonella strain that is designated YS1646Δasd/ΔFLG/ΔpagP/ΔansB/ΔcsgD/F-ΔpurI or a related strain that has genome modifications that render the strain msbB⁻/pagP⁻, lacking flagella, csgD⁻, and adenosine auxotrophs, and other optional genome modifications as described throughout the disclosure herein.

[0503] Provided are protocols or regimens for treating cancers in which PD-1 expression on macrophages in a subject is first suppressed, and then the therapeutic, such as an immunostimulatory bacteria provided herein that converts an immune desert or a T-cell excluded tumor or other tumor that is not responsive to immunotherapy into a hot tumor, responsive to immunotherapy. Following treatment with the therapeutic, the subject can then be treated with an immunotherapy, such as an anti-PD-L1 therapy. An exemplary protocol comprises:
[0504] pre-treating a subject to be treated with the delivery vehicle with an agent that suppresses PD-1 expression on macrophages to thereby promote the phagocytic capacity of the macrophage, wherein the delivery vehicle comprises nucleic acid encoding an anti-cancer product and is a vehicle that targets or can be phagocytosed by phagocytic macrophages; and
[0505] then, after a pre-determined time sufficient for the PD-1 expression to be suppressed or reduced, administering the delivery vehicle. The pre-determined time can be at least 4 hours, 5 hours, 6 hours, 7 hours, 8 hours, 9 hours, 10 hours, 12 hours, 14 hours, 16 hours, 18 hours, 20 hours, 22 hours, 24 hours, 1 day to 2 days, up to 72 hours, generally between 4 hours and 48 hours, such as 8 hours to 12 hours, or 4 hours to 24 hours, or 12 hours to 48 hours. For pre-determined time periods as used throughout the disclosure, determination of the time period can be by the skilled person, and can depend upon the particular agents and delivery vehicle administered, as well as other parameters and factors, including the subject. Further immunotherapy, such as anti-PD-L1 therapy also can be administered.

[0506] Provided are cancer treatment protocols or regimens that comprise pre-treating a subject to be treated with the delivery vehicle with an anti-PD-1 agent, whereby PD-1 expression on the macrophages is suppressed to thereby promote phagocytic capacity of the macrophages, wherein the delivery vehicle comprises nucleic acid encoding an anti-cancer product and is a vehicle that targets or can be phagocytosed by phagocytic macrophages; and then administering the delivery vehicle. The delivery vehicle is administered after a sufficient time for the PD-1 expression to be suppressed or reduced, such as at least 4 hours, 5 hours, 6 hours, 7 hours, 8 hours, 9 hours, 10 hours, 12 hours, 14 hours, 16 hours, 18 hours, 20 hours, 22 hours, 24 hours, 1 day to 2 days, up to 72 hours, or such as between 8 hours and 48 hours, or 4 hours and 12 hours, or 8 hours and 24 hours. Generally the delivery vehicle, such as an immunostimulatory bacterium is administered within 24 to 48 hours after the administration of the anti-PD-1 therapy. The protocol can include a further step of treating with an immunotherapy agent such as an immune checkpoint inhibitor. The immunotherapy is administered after the delivery agent, generally after a pre-determined time sufficient for the tumor to be susceptible to immunotherapy. For example, the protocol can include, after the anti-cancer product encoded in the delivery vehicle is expressed, whereby PD-L1 is expressed on the macrophages, then administering an anti-PD-L1 agent. The pre-determined time for the immunotherapy is at least 4 hours, 5 hours, 6 hours, 7 hours, 8 hours, 9 hours, 10 hours, 12 hours, 14 hours, 16 hours, 18 hours, 20 hours, 22 hours, 24 hours, 1 day to 2 days, up to 72 hours, or such as between 8 hours and 48 hours, or 4 hours and 12 hours, or 8 hours and 24 hours. In these protocols or regimens, the anti-PD-L1 agent can be an anti-PD-L1 antibody, such as an anti-PD-L1 antibody or other antagonist.

[0507] The delivery agent in the protocols and regimens can be one that converts macrophages that phagocytose the delivery vehicle into macrophages with the M1/M2 hybrid phenotype as described herein, such as any immunostimulatory bacterium or other therapeutic described throughout the disclosure herein as having this property, Exemplary of such a delivery agent is the bacterium designated “test strain 4” in the table in Example 39, and related strains. The protocol or regimen comprises: administering an PD-1 antibody, then administering the bacterium, and then administering an immunotherapy, such as an anti-PD-L1 antibody.

[0508] Methods of treating a subject who has an immune desert or T-cell excluded tumor, comprising:
[0509] first administering an agent that suppresses PD-1 expression on macrophages, whereby phagocytic capacity of the macrophages is increased relative to before treatment; and
[0510] then after a pre-determined time, administering a delivery vehicle that comprises nucleic acid encoding an anti-cancer product, where the delivery vehicle targets or accumulates in phagocytic macrophages; then administering the delivery vehicle. The pre-determined time can be at least 4 hours, 5 hours, 6 hours, 7 hours, 8 hours, 9 hours, 10 hours, 12 hours, 14 hours, 16 hours, 18 hours, 20 hours, 22 hours, 24 hours, 1 day to 2 days, up to 72 hours, or such as between 8 hours and 48 hours, or 4 hours and 12 hours, or 8 hours and 24 hours. The pre-determined time is sufficient for suppression of PD-1 expression on the macrophages, such as, for example, at least 4 hours, 5 hours, 6 hours, 7 hours, 8 hours, 9 hours, 10 hours, 12 hours, 14 hours, 16 hours, 18 hours, 20 hours, 22 hours, 24 hours, 1 day to 2 days, up to 72 hours, or such as between 8 hours and 48 hours, or 4 hours and 12 hours, or 8 hours and 24 hours, or 12 hours and 48 hours, or other such time period as determined by the skilled person. The methods an further include, after a second pre-determined time period, such as a time period recited above, administering immunotherapy, such as a checkpoint inhibitor, such as an anti-PD-L1 antibody or other inhibitor, to the subject.

[0511] In accord with the protocols, regimens, methods, and uses described above, the delivery vehicle can be an immunostimulatory bacterium that encodes a immunostimulatory protein, such as any described herein, such as a Salmonella species that has genome modifications whereby the bacterium lacks flagella, is an adenosine auxotroph, has penta-acylated LPS, and optionally lacks curli fimbriae, and/or is asd⁻, and optionally other genome modifications that reduce toxicity/inflammatory responses to the bacterium, and/or promotes accumulation/targeting in phagocytic macrophage. The immunostimulatory bacteria can encode one or more immunostimulatory protein(s), and optionally a tumor-associated antigen under control of a eukaryotic regulatory signals. Combinations of immunostimulatory protein include those described above and throughout the disclosure herein. Exemplary of immunostimulatory protein(s) are one or more of a cytosolic DNA/RNA sensor, a cytokine, and/or a tumor-associated antigen, such as combinations set forth above and below. Exemplary of immunostimulatory proteins are cytosolic DNA/RNA sensors, such as a modified STING protein that constitutively induces type I interferon (IFN) in macrophages (referred to as eSTING in disclosure herein), a cytokine that is IL-15 or IL-15/IL-15R alpha chain complex and/or a type I interferon (IFN) or other cytokine with similar properties to IL-15 and IL-15/IL-15R alpha chain complex. An exemplary bacterium is the bacterium is YS1646Δasd/ΔFLG/ΔpagP/ΔansB/ΔcsgD/F-ΔpurI containing a plasmid encoding IL-15/IL-15R alpha chain complex and the chimeric STING with the CTT from Tasmanian devil and the replacement N154S/R284G, such as the strain designated CRST-2000 (see Example 39) or a derivative thereof that has additional genome modifications and related strains, is/are exemplary of immunostimulatory bacteria for use in the methods, uses, protocols and other embodiments provided herein.

[0512] Provided are immunostimulatory bacteria, such as the bacteria with genome modifications as described herein, where the immunostimulatory bacterium is for use for or for use in a method for converting an immune desert or T-cell excluded tumor into hot tumors. In accord with these uses and methods, the subject to be treated is identified as having an immune desert or T-cell excluded tumor. The bacterium is administered and, following treatment, the tumors are susceptible to treatment with an immune checkpoint inhibitor or other immunotherapy was not effective for treating the tumor prior to treatment with the immunostimulatory bacterium. The immunostimulatory bacteria are any described herein, such as those that result in the M1/M2 hybrid phenotype, such as those the encode the IL-15/IL-15R alpha chain complex and eSTING that results in constitutive expression of type I interferon (IFN), and also the immunostimulatory bacteria that encode one or more of an IFNa and/or IFNb, such as the bacteria containing plasmids (or portions thereof) described in Example 57, such as a bacterium that comprises a plasmid that contains all or a part of a nucleic acid molecule with the nucleotide sequence set forth in SEQ ID NOs. 502-545 or containing degenerate codons thereof. The plasmids and portions thereof an IFNa and/or an IFNb or variant thereof that has IFNa or IFNb activity. The immunostimulatory proteins are encoded and expressed under control of a eukaryotic promoter, and optionally other regulatory sequences.

### Isolated Macrophages for Cell Therapy

[0513] Provided are isolated macrophages, comprising a therapeutic that, when introduced in the macrophage, results in a M1/M2 hybrid macrophage phenotype. The therapeutic is introduced into the macrophages in vitro or ex vivo. Following culturing or treatment or formulation of the macrophages comprising the therapeutic, the resulting compositions containing the macrophages can be administered to a subject in need of treatment with the macrophages, such as a subject with cancer, such as a cancer comprising tumors referred to as T-cell excluded tumors or desert tumors or cold tumors to thereby convert the tumors into hot tumors that are susceptible to immunotherapy. The macrophages can be allogeneic or autologous to the subject to be treated. The therapeutic can be one, such as immunostimulatory bacteria described herein, that induces a hybrid M1/M2 phenotype, whereby the macrophage can phagocytose apoptotic tumor cells, induce constitutive type I IFN to recruit and prime tumor antigen-specific CD8+ T-cells, and thereby induce durable anti-tumor immunity. The macrophages can be isolated from a subject or previously obtained and cultured, and optionally genetically modified; the therapeutic is introduced into the macrophages, which generally are cultured. The macrophages can be formulated for storage prior to use or for administration. The therapeutic includes any described herein or identified as converting macrophages into an M1/M2 phenotype. Therapeutics include immunostimulatory bacteria that encode payloads for treatment of cancers or for other applications, such as for RNA delivery, as vaccines, or treatment of diseases, disorders, and conditions. Included are immunostimulatory bacteria that encode two or more complementary immunostimulatory proteins. Exemplary of the immunostimulatory bacteria are those that comprise the phenotype YS1646/ΔFLG/ΔpagP/ΔcsgD or YS1646Δasd/ΔFLG/ΔpagP/ΔansB/ΔcsgD or YS1646Δasd/ΔFLG/ΔpagP/ΔcsgD, or other such phenotype resulting in reduced or eliminated TLR2/4/5 responses, such that the bacteria have reduced inflammatory properties compared to VNP20009, and primarily or solely infect phagocytic cells, such as macrophages. Exemplary of therapeutics are those that are delivery vehicles that comprise a nucleic acid molecule of SEQ ID NO:501, or a sequence having at least 90% or 95% or 97% or 98% or 99% or more sequence identity to SEQ ID NO:501, or a nucleic acid molecule comprising one or more degenerate codons to either SEQ ID NO:501 or the sequence having at least 90% or 95% or 97% or 98% or 99% or more sequence identity to SEQ ID NO:501.

[0514] Hence provided are uses of the therapeutics and macrophages for treatment of cancer, where the macrophages following introduction of the therapeutic are introduced into a subject with cancer or used for treatment of cancer, such as in a subject that has a T-cell excluded (or immune desert or cold tumor) or has or does not respond to immunotherapy, such as anti-PD1 immunotherapy. Provided are methods for converting an immune desert tumor or T-cell excluded tumor or cold tumor into a hot tumor, comprising administering isolated macrophages that contain the therapeutic.

[0515] Also provided, as described herein, and as set forth in the claims, are delivery vehicles, cells, pharmaceutical compositions, methods, uses, and treatments of cancer, particularly in humans. Also provided are companion diagnostics and methods for selection of subjects for treatment, and methods for monitoring treatment. These are described below, and also, in the claims, which are incorporated in their entirety into this section.

### BRIEF DESCRIPTION OF THE DRAWINGS

[0516] FIGS. 1A-1C depict the inserts in plasmids pATI-1.75 and pATI-1.76 (FIGS. 1A and 1B, respectively). FIG. 1C depicts that the Shine-Dalgarno sequence is replaced with a Kozak sequence, for translation in eukaryotic cells, such as myeloid cells.

[0517] FIG. 2 depicts the alignment of wild-type human STING (SEQ ID NO:306) and Tasmanian devil STING (SEQ ID NO:349) proteins.

[0518] FIG. 3 depicts the alignment of wild-type human STING (SEQ ID NO:306) and marmoset STING (SEQ ID NO:359) proteins.

[0519] FIG. 4 depicts the alignment of wild-type human STING (SEQ ID NO:306) and cattle STING (SEQ ID NO:360) proteins.

[0520] FIG. 5 depicts the alignment of wild-type human STING (SEQ ID NO:306) and cat STING (SEQ ID NO:356) proteins.

[0521] FIG. 6 depicts the alignment of wild-type human STING (SEQ ID NO:306) and ostrich STING (SEQ ID NO:361) proteins.

[0522] FIG. 7 depicts the alignment of wild-type human STING (SEQ ID NO:306) and crested ibis STING (SEQ ID NO:362) proteins.

[0523] FIG. 8 depicts the alignment of wild-type human STING (SEQ ID NO:306) and coelacanth STING (SEQ ID NO:363) proteins.

[0524] FIG. 9 depicts the alignment of wild-type human STING (SEQ ID NO:306) and zebrafish STING (SEQ ID NO:348) proteins.

[0525] FIG. 10 depicts the alignment of wild-type human STING (SEQ ID NO:305) and boar STING (SEQ ID NO:365) proteins.

[0526] FIG. 11 depicts the alignment of wild-type human (SEQ ID NO:305) and bat STING (SEQ ID NO:366) proteins.

[0527] FIG. 12 depicts the alignment of wild-type human (SEQ ID NO:305) and manatee STING (SEQ ID NO:367) proteins.

[0528] FIG. 13 depicts the alignment of wild-type human (SEQ ID NO:305) and ghost shark STING (SEQ ID NO:368) proteins.

[0529] FIG. 14 depicts the alignment of wild-type human (SEQ ID NO:305) and mouse STING (SEQ ID NO:369) proteins.

[0530] FIG. 15 is adapted from Röszer et al., ((2018) Cells 7(8):103). Röszer et al. presents a scheme summarizing signals that impede or facilitate cell cycle entry and progression in macrophages.

[0531] FIG. 16 depicts priming and activation of tumor-associate antigen (TAA)-specific CD8+ T-cells and induction of anti-tumor immunity by the exemplary immunostimulatory bacterium, designated as STACT, that encodes IL-15/IL-15R alpha chain complex+eSTING that constitutively induces type I IFN, such as an eSTING.

[0532] FIGS. 17A-F. FIG. 17A depicts a schematic from Anfray et al. Cells (2019) which lists molecular pathways previously associated with tumor-associated macrophage (TAM) phenotypes. FIG. 17B depicts a cartoon of an M1 macrophage (top) and M2 macrophage (bottom) and resulting macrophage with an M2 hybrid phenotype, described herein. FIG. 17C describes the macrophage markers that comprise the M1/M2 hybrid phenotype described herein and the results upon infection of tumor-resident macrophage by the immunostimulatory bacterium described herein and expression of the encoded payload. FIG. 17D is from Röszer, T. ((2015) Mediators Inflamm 2015:816460) which represents examples of M2 activation and markers associated with the distinct activation phenotypes of M1 and M2, and not a hybrid M1/M2. FIG. 17E depicts the STACT mechanism of action. FIG. 17F is adapted from a figure depicting the Cancer-Immunity Cycle in Chen and Mellman ((2013) Immunity 39(1):1-10) and depicts STACT IL-15plex+eSTING as a Comprehensive Immunotherapy.

[0533] FIG. 18 depicts SPP1 expression in tumor tissue compared to normal tissue in a variety of tumor types and tissues. Color of p-value text and shape surrounding p-value represents direction; gray p-value surrounded by oval=lower in tumor (Neg); light gray p-value surrounded by rectangle, higher in tumor (Pos); and very light gray p-value with no shape around p-value, no significance (NS). The cancer types are ordered by the median expression of the tumor samples (left to right corresponding to high to low).

[0534] FIG. 19 depicts C1QC expression in tumor tissue compared to normal tissue in a variety of tumor types and tissues. Color of p-value text and shape surrounding p-value represents direction; gray p-value surrounded by oval=lower in tumor (Neg); light gray p-value surrounded by rectangle, higher in tumor (Pos); and very light gray p-value with no shape around p-value, no significance (NS). The cancer types are ordered by the median expression of the tumor samples (left to right corresponding to high to low).

[0535] FIG. 20 depicts a Kaplan-Meier (KM) plot of a bioinformatics analysis of groups with high or low C1QC expression in consensus molecular subtype 1 (CMS1) colorectal cancer.

[0536] FIG. 21 depicts a forest plot showing the results for Gene expression of 23 tumor types from The Cancer Genome Atlas (abbreviated TCGA). The Cox proportional hazard regression model was calculated, to test for the association between prognosis and expression of SPP1 as a continuous variable. The shape of the dot represents the p-value; a triangle represents p<0.05. The dot is the hazard ratio for each comparison and the black lines are the 95% confidence intervals.

[0537] FIG. 22 depicts a forest plot showing the results for Gene expression of 23 tumor types from The Cancer Genome Atlas (TCGA). The Cox proportional hazard regression model was calculated, to test for the association between prognosis and expression of C1QC as a continuous variable. The shape of the dot represents the p-value; a triangle represents p<0.05. The dot is the hazard ratio for each comparison and the black lines are the 95% confidence intervals.

[0538] FIGS. 23A-B depict the quantity of proliferating macrophages across histologies based on analysis was performed on tumor types using published scRNA-seq datasets. The proportions are depicted in the graphs as percentages (0.05=5%) and calculated using proportion of CD68+ cells of total CD45+ cells (FIG. 23A), and proportion of G2/M score+ of total CD68+ macrophages (FIG. 23B) from tumor tissue samples of all patients in each dataset. Boxes represent median±interquartile range and whiskers ±1.5× interquartile range. Outliers are represented by black dots.

[0539] FIG. 24 depicts a box and whisker plots generated from the apoptosis module expression data from The Cancer Genome Atlas (abbreviated as TCGA; 161 genes associated with apoptosis), compared to cancer types and ordered by median expression.

[0540] FIGS. 25A-F depict box plots of the G2M score (FIGS. 25A-C) and STMN1 expression (FIGS. 25D-F) in non-proliferating and proliferating macrophages in lung cancer (A, D); breast cancer (B, E); and Colon cancer (not stratified into CMS subtypes) (C, F).

[0541] FIG. 26 depicts association plots that show association of SPP1 expression with alterations in major cancer pathways, where the y-axis represents the −log 10(p-value), where the higher the dot corresponds to a lower p-value. The different dots represent tumor type.

[0542] FIG. 27 depicts association plots that show association of C1QC with alterations in major cancer pathways, where the y-axis represents the −log 10(p-value), where the higher the dot corresponds to a lower p-value. The different dots represent tumor type.

[0543] FIG. 28 depicts a box plot of CD68 expression in breast cancer patients at baseline, or following either 2 cycles of epirubicin and docetaxol (C2, chemo only), or 4 cycle of chemotherapy+surgery and bevacizumab (C4, sur+chemo+bev).

[0544] FIG. 29 depicts a box plot of CD68 expression in breast cancer patients at baseline, or following either 2 cycles of epirubicin and docetaxol (C2, chemo only), or 4 cycle of chemotherapy+surgery and bevacizumab (C4, sur+chemo+bev).

[0545] FIG. 30 depicts pHRodo® reagent, a dye that is fluorescent only in acidic cellular components, and CellTrace® reagent labeling of YS1646Δasd/ΔFLG/ΔpagP/ΔansB/ΔcsgD containing the plasmid encoding IL-15 receptor complex and chimeric STING, where the plasmid has the sequence set forth in SEQ ID NO:501, internalized by THP-1 differentiated into M0 macrophages over time. pHRodo® and CellTrace® reagent labeling is shown after bactofection at MOI 1, 5, 20 and 40 at 90 minutes (top panel) and 48 hours (bottom panel).

[0546] FIGS. 31A-F depict the uptake of YS1646Δasd/ΔFLG/ΔpagP/ΔansB/ΔcsgD containing the plasmid encoding IL-15 receptor complex and chimeric STING, where the plasmid has the sequence set forth in SEQ ID NO:501, internally by M0, M1, and M2 macrophages after bactofection at MOI 1, 5, 20 and 40. The uptake is depicted in M0 macrophages as measured by pHRodo® reagent (FIG. 31A) and CellTrace® reagent (FIG. 31D); in M1 macrophages as measured by pHRodo® reagent (FIG. 31B) and CellTrace® reagent (FIG. 31E); and in M2 macrophages as measured by pHRodo® (FIG. 31C) and CellTrace® reagent (FIG. 31F).

[0547] FIGS. 32A and 32B depict STING reporter luciferase activity in wild-type M0 THP-1 derived macrophages; THP-1 cells that were not bactofected and THP-1 cells to which cGAMP was added also is shown. FIG. 32A depicts STING reporter luciferase activity in wild-type M0 THP-1 derived macrophages at MOI 1, 5, 20 and 40 measured at 90 minutes, 3 hours, 24 hours, and 48 hours after bactofection. FIG. 32B depicts STING reporter luciferase activity in wild-type M0 THP-1 derived macrophages at MOI 1, 5, 20 and 40 measured 48 hours after bactofection.

[0548] FIG. 33 depicts the cell cycle-dependent internalization of STACT (as referred to in Example 58, YS1646Δasd/ΔFLG/ΔpagP/ΔansB/ΔcsgD containing the plasmid encoding IL-15 receptor complex and chimeric STING, where the plasmid has the sequence set forth in SEQ ID NO:501). The top left panel shows the quadrant of the graph that corresponds to cell cycle phase. The bottom left panel depicts the cell cycle phase of non-stained cells. The top right panel depicts the cell cycle phase for M0 cells that were not bactofected (left), bactofected at MOI 20 and 40 (middle), and cells bactofected with a bacterium comprising asd but no plasmid as a control (right). The middle right panel depicts the cell cycle phase for M1 cells that were not bactofected (left), bactofected at MOI 20 and 40 (middle), and cells with ASD (right). The bottom right panel depicts the cell cycle phase for M2 cells that were not bactofected (left), bactofected at MOI 20 and 40 (middle), and cells with ASD (right).

[0549] FIG. 34 is a schematic that depicts the high level of adenosine and immune exclusion that is triggered by hypoxia in tumors.

[0550] FIGS. 35A and 35B depict tumors with high CD73 and CD39 expression.

[0551] FIG. 35A depicts a box and whisker plot showing the median expression of CD73 for each tumor indication from the Atlas (abbrev. TCGA). FIG. 35B is a scatterplot depicting expression of the ENTPD-1 gene (CD39) verses expression of the NT5E gene (CD73) for tumor indications in the TCGA; triangles represent top indications, and the tumor indications are shown in gradations according to Kummel myeloid signatures.

[0552] FIGS. 36A and 36B depict Krummel T cell, myeloid, and stromal cell signatures across solid tumor indications in TCGA. Triangles represent top indications, and the tumor indications are shown in gradations according to NT5E (CD73) expression. FIG. 36A is a scatterplot depicting Krummel T cell verses myeloid cell signatures. FIG. 36B is a scatterplot depicting Krummel stromal cell verses myeloid cell signatures.

[0553] FIGS. 37A-F depict myeloid cell markers from the TCGA across the C1-C6 immune subtypes (wound healing (C1), IFN-γ dominant (C2), inflammatory (C3), lymphocyte depleted (C4), immunologically quiet (C5), and TGF-β dominant (C6)) defined in Thorsson et al. (2018) Immunity 48(4):812-830. The key characteristics of each immune subtype is shown in FIG. 37A. Overall survival in years is shown for each immune subtype in FIG. 37B. In FIGS. 37C-F, box and whisker plots depict Krummel T cell signatures for each subtype from TCGA (FIG. 37C); Krummel myeloid cell signatures for each subtype from TCGA (FIG. 37D); MRC1 expression for each subtype from TCGA (FIG. 37E); and CD163 expression for each subtype from TCGA (FIG. 37F).

[0554] FIG. 38 depicts tumor indications with high myeloid cell signatures, T cell signatures, hypoxia markers, adenosine markers, TGFbeta and antigen presentation in TCGA.

[0555] FIG. 39 depicts metastatic cancer indications with high myeloid cell signatures, T cell signatures, hypoxia markers, adenosine markers, TGFbeta and antigen presentation in MET500 dataset.

[0556] FIGS. 40A-C depict syngeneic mouse models with high T cell, myeloid and stromal infiltration and high adenosine from the TISMO database. FIG. 40A is a plot depicting a rank-based scoring for a set of genes within fibroblast signatures verses a set of genes within myeloid cell signatures for syngeneic mouse models. The models are shown in gradations according to the rank-based scoring for a set of genes within T cell signatures. FIG. 40B is a plot depicting a rank-based scoring for a set of genes within T cell signatures verses a set of genes within myeloid cell signatures for syngeneic mouse models. The models are shown in gradations according to Cd8a expression. FIG. 40C is a plot depicting the expression of NT5E (CD73) verses CD68, a marker for high myeloid content, for syngeneic mouse models. The models are shown in gradations according to Sting1 expression.

[0557] FIG. 41 depicts box and whisker plots generated from SPP1 expression across TCGA, and compared to cancer types ordered by median expression. The COAD and READ colorectal cancers were separated into their CMS subtypes and plotted.

[0558] FIG. 42 depicts box and whisker plots generated from C1QC expression across TCGA, and compared to cancer types ordered by median expression. The COAD and READ colorectal cancers were separated into their CMS subtypes and plotted.

### DETAILED DESCRIPTION

[0559] OUTLINE
[0560] A. DEFINITIONS
[0561] B. OVERVIEW OF IMMUNOSTIMULATORY BACTERIA FOR CANCER THERAPY
   [0562] 1. Bacterial Cancer Immunotherapy
   [0563] 2. Prior Therapies that Target the Tumor Microenvironment
      [0564] a. Limitations of Autologous T-Cell Therapies
      [0565] b. Viral Vaccine Platforms
      [0566] c. Bacterial Cancer Therapies
         [0567] i. Listeria
         [0568] ii. Salmonella Species
         [0569] iii. VNP20009 (YS1456)
         [0570] iv. Wild-Type Strains
   [0571] 3. Limitations of Existing Bacterial Cancer Immunotherapies
   [0572] 4. Therapeutics That Induce a Hybrid M1/M2 Anti-tumor Phenotype in Tumor-Resident Macrophages
[0573] C. MODIFICATIONS AND ENHANCEMENTS OF IMMUNOSTIMULATORY BACTERIA TO INCREASE THERAPEUTIC INDEX AND TO INCREASE ACCUMULATION IN TUMOR-RESIDENT MYELOID CELLS
   [0574] 1. Deletions in Genes in the LPS Biosynthetic Pathway
      [0575] a. nsbB Deletion
      [0576] b. pagP Deletion or Inactivation
   [0577] 2. Nutrient Auxotrophy
      [0578] a. purI Deletion/Disruption
      [0579] b. Adenosine Auxotrophy
      [0580] c. Thymidine Auxotrophy
   [0581] 3. Plasmid Maintenance and Delivery
      [0582] a. asd Deletion
      [0583] b. endA Deletion/Disruption
   [0584] 4. Flagellin Knockout Strains
   [0585] 5. Engineering Bacteria to Promote Adaptive Immunity and Enhance T-Cell Function L-Asparaginase H (ansB) Deletion/Disruption
   [0586] 6. Deletions/Disruptions in Salmonella Genes Required to Produce Curli Fimbriae csgD Deletion
   [0587] 7. Improving Resistance to Complement Rck Expression
   [0588] 8. Deletions of Genes Required for Lipoprotein Expression in Salmonella and Other Gram-Negative Bacteria
   [0589] 9. Robust Immunostimulatory Bacteria Whose Genomes are Optimized for Anti-Tumor Therapy, and that Encode Therapeutic Products, Including a Plurality Thereof
   [0590] 10. Vaccines and Bacteria that Deliver RNA, including mRNA and other Forms of RNA, for Expression in a Eukaryotic Host
   [0591] 11. Bacterial Vaccines Against Particular Antigens, Including from Pathogens, and also from Tumors, for use as Anti-Pathogen Treatments and Vaccines, and For Anti-Cancer Treatment and/or Prevention
   [0592] 12. Conversion of M2 Phenotype Macrophages into M1 and M1-Like Phenotype Macrophages
[0593] D. IMMUNOSTIMULATORY BACTERIA WITH ENHANCED THERAPEUTIC INDEX ENCODING GENETIC PAYLOADS THAT STIMULATE THE IMMUNE RESPONSE IN THE TUMOR MICROENVIRONMENT
   [0594] 1. Immunostimulatory Proteins
      [0595] a. Cytokines and Chemokines
      [0596] b. Co-Stimulatory Molecules
   [0597] 2. Constitutively Active Proteins that Stimulate the Immune Response and/or Type I IFN, Non-Human STING Proteins, STING Chimeras, and Modified Forms
      [0598] a. Constitutive STING Expression and Gain-of-Function Mutations
      [0599] b. Constitutive IRF3 Expression and Gain-of-Function Mutations
      [0600] c. Non-Human STING Proteins, and Variants Thereof with Increased or Constitutive Activity, and STING Chimeras, and Variants Thereof with Increased or Constitutive Activity
      [0601] d. Other Gene Products that Act as Cytosolic DNA/RNA Sensors and Constitutive Variants Thereof
         [0602] i. RIG-I
         [0603] ii. MDA5/IFIH1
         [0604] iii. IRF7
      [0605] e. Other Type I IFN Regulatory Proteins
   [0606] 3. Antibodies and Antibody Fragments
      [0607] a. TGF-β
      [0608] b. Bispecific scFvs and T-Cell Engagers
      [0609] c. Anti-PD-1, Anti-PD-L1 and Anti-CTLA-4 Antibodies
         [0610] i. Anti-PD-1/Anti-PD-L1 Antibodies
         [0611] ii. Anti-CTLA-4 Antibodies
      [0612] d. Additional Exemplary Checkpoint Targets
   [0613] 4. Combinations of Immunomodulatory Proteins can have Synergistic Effects and/or Complementary Effects
   [0614] 5. Molecules that Activate Prodrugs
   [0615] 6. Immunostimulatory Bacteria that Deliver Combination Therapies
[0616] E. IMMUNOSTIMULATORY BACTERIA AS ANTIVIRAL THERAPEUTICS AND AS THERAPEUTICS AGAINST OTHER INFECTIOUS PATHOGENS
[0617] F. CONSTRUCTING EXEMPLARY PLASMIDS ENCODING THERAPEUTIC PRODUCTS FOR BACTERIAL DELIVERY
   [0618] 1. Constitutive Promoters for Heterologous Expression of Proteins
   [0619] 2. Multiple Therapeutic Product Expression Cassettes
      [0620] a. Single Promoter Constructs
      [0621] b. Dual/Multiple Promoter Constructs
   [0622] 3. Regulatory Elements
      [0623] a. Post-Transcriptional Regulatory Elements
      [0624] b. Polyadenylation Signal Sequences and Terminators
      [0625] c. Enhancers
      [0626] d. Secretion Signals
      [0627] e. Improving Bacterial Fitness
   [0628] 4. Origin of Replication and Plasmid Copy Number
   [0629] 5. CpG Motifs and CpG Islands
   [0630] 6. Plasmid Maintenance/Selection Components
   [0631] 7. DNA Nuclear Targeting Sequences
[0632] G. EXEMPLARY BACTERIAL STRAINS AND MECHANISM OF ACTION FOR USE AS VACCINES AND THERAPEUTICS
   [0633] 1. Exemplary Immunostimulatory Bacteria—In Situ Cancer Vaccination Mechanism of Action (MOA)
   [0634] 2. Exemplary Immunostimulatory Bacteria for Peripheral Cancer Vaccination and Mechanism of Action
   [0635] 3. Exemplary Immunostimulatory Bacteria for Pathogen Vaccination and MOA
   [0636] 4. Exemplary Immunostimulatory Bacteria for Treatment of Cancer
[0637] H. PHARMACEUTICAL PRODUCTION, COMPOSITIONS, AND FORMULATIONS
   [0638] 1. Manufacturing
      [0639] a. Cell Bank Manufacturing
      [0640] b. Drug Substance Manufacturing
      [0641] c. Drug Product Manufacturing
   [0642] 2. Compositions
   [0643] 3. Formulations
      [0644] a. Liquids, Injectables, Emulsions
      [0645] b. Dried Thermostable Formulations
   [0646] 4. Compositions for Other Routes of Administration
   [0647] 5. Dosages and Administration
   [0648] 6. Packaging and Articles of Manufacture
[0649] I. METHODS OF TREATMENT AND USES
   [0650] 1. Diagnostics for Patient Selection for Treatment and for Monitoring Treatment
      [0651] a. Patient Selection
      [0652] b. Diagnostics to Assess or Detect Activity of the Immunostimulatory Bacteria are Indicative of the Effectiveness of Treatment
   [0653] 2. Tumors
   [0654] 3. Administration
   [0655] 4. Monitoring
[0656] J. EXAMPLES

### A. Definitions

[0657] Unless defined otherwise, all technical and scientific terms used herein have the same meaning as is commonly understood by one of skill in the art to which the invention(s) belong. All patents, patent applications, published applications and publications, GenBank sequences, databases, websites and other published materials referred to throughout the entire disclosure herein, unless noted otherwise, are incorporated by reference in their entirety. In the event that there are a plurality of definitions for terms herein, those in this section prevail. Where reference is made to a URL or other such identifier or address, it is understood that such identifiers can change and particular information on the internet can come and go, but equivalent information can be found by searching the internet. Reference thereto evidences the availability and public dissemination of such information.

[0658] As used herein, STACT refers to the 5. Typhimurium-Attenuated Cancer Therapy strain. STACT generally refers to the exemplary strain designated YS1646Δasd/ΔFLG/ΔpagP/ΔansB/ΔcsgD. YS1646, described in the detailed description is msbB⁻ and purI⁻ by virtue of genome modifications that disrupt expression of the gene products. STACT includes these modifications, and optionally includes full gene deletions of either or both msbB and purI. The STACT strain in the Examples includes a full deletion of purI. The STACT strains modifications, including genome modifications that eliminate flagella and render the bacteria csgD⁻ in addition to msbB and purI⁻. The modifications that render the bacterium asd⁻ and/or ansB⁻ are optional, and are user selected for a particular application or protocol. The STACT strains are exemplary of the immunostimulatory bacteria described and provided herein. These immunostimulatory bacteria, including the exemplary bacteria designated STACT, comprise the genome modifications that delete flagella and biofilm (csgD⁻) and result in penta-acylated LPS. This includes strains that comprise the phenotype Δasd/ΔFLG/ΔpagP/ΔansB/ΔcsgD, with modifications of purI and msbB⁻ (either by insertions, deletions, transpositions, or complete deletion of each gene) result in advantageous properties discussed and demonstrated throughout the disclosure herein. These properties include, but are not limited to, for example: (1) enhanced, compared to the unmodified parental strain YS1467 (also designated VNP20009), tolerability after IV dosing, (2) tumor-specific enrichment, (3) phagocytosis by tumor-resident antigen-presenting cells (APCs) with a lack of epithelial cell infectivity, (4) provision of multiplexed genetic cargo delivery, and (5) attenuation of bacterial pathways that impair CD8⁺ T-cell function. STACT bacteria can encode payloads, such as therapeutic proteins, such as immunostimulatory proteins, such as cytokines, co-stimulatory molecules, cyclic DNA/RNA sensors, particularly those modified to constitutively induce type I interferon (IFN), type I interferon (IFN)s, tumor-associated antigens or other antigens, antibodies, and other such proteins.

[0659] As used herein, “therapeutic bacteria” are bacteria that effect therapy, such as anti-cancer or anti-tumor therapy, when administered to a subject, such as a human.

[0660] As used herein, a therapeutic that is provided herein comprises a delivery vehicle and nucleic acid, such as DNA, that is delivered to cells or tissues, such as tumor-resident immune cells, the tumor microenvironment, and tumor, where it is taken up by cells, such as tumor-resident immune cells and the nucleic acid is expressed in the cells. Generally the nucleic acid encodes one or more immunostimulatory proteins, including proteins that induce type I IFN expression, and the delivery vehicle is designed or formed or formulated so that it does not induce sufficient TLR2 or combinations of one or more of TLR2, TLR4, and TLR5 activity to inhibit type I IFN, such as the that induced by an encoded immunostimulatory protein, such as STING protein.

[0661] As used herein, a therapeutic targeted to particular tissues or cells, such as tumors, refers to active targeting in which the therapeutic is directed to tissue or cells, such as by including a protein that binds to a cell surface protein, and also passive targeting in which something accumulates in a cells, such as a cell in which the targeted therapeutic ends up because it cannot be taken up by other cells. A tumor-targeted therapeutic is a therapeutic that ends up in or accumulates in the tumor microenvironment, cells in the tumor microenvironment, and/or the tumor. Generally tumor-targeted therapeutics do not end up in or minimally end up in other cells and tissues and non-tumor loci.

[0662] As used herein, “immunostimulatory bacteria” are therapeutic bacteria that, when introduced into a subject, accumulate in immunoprivileged tissues and cells, such as tumors, the tumor microenvironment and tumor-resident immune cells, and replicate and/or express products that are immunostimulatory or that result in immunostimulation. For example, the immunostimulatory bacteria are attenuated in the host by virtue of reduced toxicity or pathogenicity and/or by virtue of encoded products that reduce toxicity or pathogenicity, as the immunostimulatory bacteria cannot replicate and/or express products (or have reduced replication/product expression), except primarily in immunoprivileged environments, such as the tumor microenvironment (TME). Immunostimulatory bacteria provided herein are modified to encode a product or products, and/or to exhibit a trait or property that renders them immunostimulatory. The immunostimulatory bacteria also include genome modifications so that an endogenous product or products is/are not expressed. The bacteria can be said to be deleted in such product(s). Those of skill in the art recognize that genes can be inactivated by deletions, disruptions, including transposition or insertion of transposons, insertions, and any other changes that eliminate the gene product. This can be achieved by insertions, deletions, and/or disruptions, including transpositions or inclusion of transposons. Examples of genes that are inactivated include, for example, msbB, pagP, ansB, gene(s) encoding curli fimbriae, genes encoding flagella whereby the bacterium lacks flagella, and other modifications described herein and/or known to those of skill in the art. Those of skill in the art also understand that corresponding genes in various bacterial species may have different designations. The encoded products, properties and traits in the immunostimulatory bacteria, include, but are not limited to, for example, at least one of: an immunostimulatory protein, such as a cytokine, chemokine, or co-stimulatory molecule; a cytosolic DNA/RNA sensor or gain-of-function or constitutively active variant thereof (e.g., STING, IRF3, IRF7, IRF-8, MDA5, RIG-I); RNAi, such as siRNA (shRNA and microRNA), or CRISPR, that targets, disrupts, or inhibits an immune checkpoint, such as, for example, TREX1, PD-1, CTLA-4 and/or PD-L1; antibodies and fragments thereof, such as an anti-immune checkpoint antibody, an anti-IL-6 antibody, an anti-VEGF antibody, or a TGF-β inhibitory antibody; other antibody constructs, such as bi-specific T-cell engagers (BiTE® antibodies); soluble TGF-β receptors that act as decoys for binding TGF-β, or TGF-β antagonizing polypeptides; and IL-6 binding decoy receptors. Immunostimulatory bacteria also can include a modification that renders the bacteria auxotrophic for a metabolite that is immunosuppressive or that is in an immunosuppressive pathway, such as adenosine.

[0663] As used herein, the strain designations VNP20009 (see, e.g., International PCT Application Publication No. WO 99/13053, see, also U.S. Pat. No. 6,863,894), YS1646, and 41.2.9 are used interchangeably, and each refers to the strain deposited with the American Type Culture Collection (ATCC) and assigned Accession No. 202165. VNP20009 is a modified attenuated strain of Salmonella typhimurium, which contains deletions or other modifications in msbB and purI, and was generated from wild-type S. typhimurium strain ATCC #14028.

[0664] As used herein, the strain designations YS1456 and 8.7 are used interchangeably and each refer to the strain deposited with the American Type Culture Collection (ATCC) and assigned Accession No. 202164 (see, U.S. Pat. No. 6,863,894). This strain msbB⁻ and purI⁻, and is the VNP2009 strain.

[0665] As used herein, recitation that a bacterium is “derived from” a particular strain means that such strain can serve as a starting material and can be modified to result in the particular bacterium.

[0666] As used herein, T cell exhaustion is a state of T cell dysfunction that arises during many chronic infections and cancer. It describes the response of T cells to chronic antigen stimulation in these settings. It is defined by poor effector function, sustained expression of inhibitory receptors, and a transcriptional state distinct from that of functional effector or memory T cells. It is characterized by the stepwise and progressive loss of T-cell functions.

[0667] As used herein, a gene module is a set or group of genes with similar expression profiles or by one or more genetic or cellular interactions, such as a set of co-expressed genes to which the same set of transcription factors bind. For example, a G2M score is a set of genes associated with the cell cycle transition from G2 to M, and thus, serves as an indicating or cell proliferation.

[0668] As used herein, proliferating macrophage can be identified by some or all of the following: Tumor gene expression of G2M module (>14 genes of the set), and Stathmin1 (STMN1); and/or

[0669] Biopsy surface markers: CD68+KI67 and/or PCNA, MERTK. Proliferating macrophage can exhibit all of the above markers or a subset thereof. For example, gene expression of the G2M module, where more than half (>14 genes of the set) are expressed. Additionally STMN1+the G2M module can be used to confirm proliferating. Alternatively tumor macrophage can be biopsied and assed for expression of at least two of CD68, MERTK, and K167 and/or PCNA.

[0670] As used herein, an M1/M2 hybrid phenotype, refers to a phenotype induced in macrophages by therapeutic, such as an immunostimulatory bacterium provided herein that is attenuated by reducing or eliminating TLR2/4/5 responses to the bacterium and that encodes a non-integrating immunostimulatory payload, such as the combination of a cytokine and a STING protein that constitutively induces type I IFN. The phenotype is a proliferating and phagocytic macrophage and is associated, for example, with a combination of at least two, generally at least 3 of the following markers:
[0671] Hybrid Markers (lower than M2, higher than M1): SPP1, CD209, CD206, such as CD209 and CD206, and/or
[0672] Two or more Induced Markers: MERTK, C1QC, IFN-α2a, IFNβ1, CXCL10, 4-1BBL (TNFSF9), MYC.
   The tables in the Summary above, and examples compare macrophage phenotypes before and after administration of the exemplary therapeutic STACT encoding IL-15/IL-15R alpha chain complex+eSTING (constitutive STING), such as the chimeric human STING with gain-of-function mutations and Tasmanian devil CTT.

[0673] As used herein, recitation of “expression of type I IFN in the macrophage is not inhibited” upon introduction of a therapeutic, delivery vehicle, or nucleic acid, means that the type I IFN occurs in the macrophage at level that is higher than in the macrophage prior to introduction of the therapeutic, delivery vehicle, or nucleic acid.

[0674] As used herein, an “expression cassette” refers to a nucleic acid construct that includes regulatory sequences for gene expression, operatively linked to nucleic acid encoding open reading frames (ORFs) that encode payloads, such as therapeutic products, or other proteins.

[0675] As used herein, 2A peptides are 18-22 amino-acid (aa)-long viral oligopeptides that mediate cleavage of polypeptides during translation in eukaryotic cells. The designation “2A” refers to a specific region of the viral genome, and different viral 2As have generally been named after the virus they were derived from. Exemplary of these are F2A (foot-and-mouth disease virus 2A), E2A (equine rhinitis A virus), P2A (porcine teschovirus-1 2A), and T2A (Thosea asigna virus 2A). See, e.g., Liu et al. (2017) Scientific Reports 7:2193, FIG. 1, for encoding sequences. See, also, SEQ ID NOs:327-330. These peptides generally share a core sequence motif of DxExNPGP, and occur in a large number of viral families. They help break apart polyproteins by causing the ribosome to fail at making a peptide bond. The 2A peptides provide for multicistronic/polycistronic vectors, in which a plurality of proteins are expressed from a single open reading frame (ORF). For purposes herein, the 2A peptides include those that are naturally occurring, and any modified forms thereof, such as any having at least 97%, 98%, or 99% sequence identity with any naturally-occurring 2A peptide, including those disclosed herein, that result in single polypeptides being transcribed and translated from a transcript comprising a plurality (2 or more) of open reading frames.

[0676] As used a Cap Independent Translation Enhancer (CITE) sequence is a eukaryotic translation element that is part of an RNA molecule transcribed in a bacterium such that the RNA is not translated in the bacterium, but is translated in animal cells (see, e.g., U.S. Pat. No. 6,500,419). CITE sequences designed for transcription of RNA that can be translated in eukaryotic cells, but not bacterial cells, are commercially available. Exemplary is one that corresponds to the nucleotide sequence from nucleotide 2416 to nucleotide 2914 of pCITE-1 (Novagen, Inc., Madison, Wis.).

[0677] As used herein, an “interferonopathy” refers to a disorder associated with an upregulation of interferon by virtue of a mutation in a gene product involved in a pathway that regulates or induces expression of interferon. The activity of the products normally is regulated by a mediator, such as cytosolic DNA or RNA or nucleotides; when the protein product is mutated, the activity is constitutive. Type I interferonopathies include a spectrum of conditions, including the severe forms of Aicardi-Goutières Syndrome (AGS), and the milder Familial Chilblain Lupus (FCL). Nucleic acid molecules encoding mutated products with these properties can be produced in vitro, such as by selecting for mutations that result in a gain-of-function in the product, compared to the product of an allele that has normal activity, or has further gain-of-function compared to the disease-associated gain-of-function mutants described herein.

[0678] As used herein, a “gain-of-function mutation” is one that increases the activity of a protein compared to the same protein that does not have the mutation. For example, if the protein is a receptor, it will have increased affinity for a ligand; if it is an enzyme, it will have increased activity, including constitutive activity. In particular, with respect to products, such as STING, IRF3, IRF7, MDA5, RIG-I, a constitutively active product is one that is active in the absence of a its activating ligands, such as cGAS for STING, and/or in the absence of cytosolic nucleic acids, such as DNA, RNA, nucleotides, dinucleotides, cyclic nucleotides and/or cyclic dinucleotides or other nucleic acid molecules, that lead to production of type I interferon. These nucleic acid molecules in the cytosol occur from viral or bacterial infection and/or radiation or other such exposure, leading to activation of an immune response in a host against such pathogen.

[0679] As used herein, an “origin of replication” is a sequence of DNA at which replication is initiated on a chromosome, or a plasmid, or in a virus. For small DNA, including bacterial plasmids and small viruses, a single origin is sufficient.

[0680] The origin of replication determines the vector copy number, which depends upon the selected origin of replication. For example, if the expression vector is derived from the low-copy-number plasmid pBR322, the copy number is between about 15-20 copies/cell, and if derived from the high-copy-number plasmid pUC, it can be 500-700 copies/cell. As used herein, medium copy number of a plasmid in cells is about or is 150 or less than 150, and low copy number is 5-30, such as 20 or less than 20. Low to medium copy number is less than 150 copies/cell. High copy number is greater than 150 copies/cell.

[0681] As used herein, a “CpG motif” is a pattern of bases that includes an unmethylated central CpG (“p” refers to the phosphodiester link between consecutive C and G nucleotides), surrounded by at least one base flanking (on the 3′ and the 5′ side of) the central CpG. A CpG oligodeoxynucleotide is an oligodeoxynucleotide that is at least about ten nucleotides in length and includes an unmethylated CpG. At least the C of the 5′ CG 3′ is unmethylated.

[0682] As used herein, a “RIG-I binding sequence” refers to a 5′triphosphate (5′ppp) structure directly, or that which is synthesized by RNA polymerase III from a poly(dA-dT) sequence, which, by virtue of interaction with RIG-I, can activate type I IFN via the RIG-I pathway. The RNA includes at least four A ribonucleotides (A-A-A-A); it can contain 4, 5, 6, 7, 8, 9, 10, or more. The RIG-I binding sequence is introduced into a plasmid in the bacterium for transcription into the poly(A).

[0683] As used herein, “cytokines” are a broad and loose category of small proteins (˜5-20 kDa) that are important in cell signaling. Cytokines include chemokines, interferons, interleukins, lymphokines, and tumor necrosis factors. Cytokines are cell signaling molecules that aid cell to cell communication in immune responses, and stimulate the movement of cells towards sites of inflammation, infection and trauma. As used herein, “chemokines” refer to chemoattractant (chemotactic) cytokines that bind to chemokine receptors and include proteins isolated from natural sources as well as those made synthetically, as by recombinant means or by chemical synthesis. Exemplary chemokines include, but are not limited to, IL-8, IL-10, GCP-2, GRO-α, GRO-β, GRO-γ, ENA-78, PBP, CTAP III, NAP-2, LAPF-4, MIG (CXCL9), CXCL10 (IP-10), CXCL11, PF4, SDF-1α, SDF-1β, SDF-2, MCP-1, MCP-2, MCP-3, MCP-4, MCP-5, MIP-1α (CCL3), MIP-1β (CCL4), MIP-1γ (CCL9), MIP-2, MIP-2α, MIP-3α, MIP-3β, MIP-4, MIP-5, MDC, HCC-1, ALP, Lungkine, TIM-1, Eotaxin-1, Eotaxin-2, I-309, SCYA17, TRAC, RANTES (CCL5), DC-CK-1, lymphotactin, and fractalkine, and others known to those of skill in the art. Chemokines are involved in the migration of immune cells to sites of inflammation, as well as in the maturation of immune cells, and in the generation of adaptive immune responses.

[0684] As used herein, an “immunostimulatory protein” is a protein that exhibits or promotes an anti-tumor immune response in the tumor microenvironment. Exemplary of such proteins are cytokines, chemokines, and co-stimulatory molecules, such as, but not limited to, IFN-α, IFN-β, GM-CSF, IL-2, IL-7, IL-12, IL-15, IL-18, IL-21, IL-23, IL-12p70 (IL-12p40+IL-12p35), IL-15/IL-15R alpha chain complex (also referred to herein as IL-15/IL-15Rα, IL-15Rα-IL-15sc, IL-15 complex, and other variations, set forth herein), IL-36 gamma, IL-2 that has attenuated binding to IL-2Ra, IL-2 that is modified so that it does not bind to IL-2Ra, CXCL9, CXCL10 (IP-10), CXCL11, CCL3, CCL4, CCL5, molecules involved in the potential recruitment and/or persistence of T-cells, CD40, CD40 ligand (CD40L), OX40, OX40 ligand (OX40L), 4-1BB, 4-1BB ligand (4-1BBL), 4-1BBL with a deleted cytoplasmic domain (1BBLΔcyt), or with a partially deleted (truncated) cytoplasmic domain, members of the B7-CD28 family, and members of the tumor necrosis factor receptor (TNFR) superfamily.

[0685] Among the immunostimulatory proteins are truncated co-stimulatory molecules, such as, for example, 4-1BBL, CD80, CD86, CD27L, B7RP1 and OX40L, each with a full or partial cytoplasmic domain deletion, for expression on an antigen-presenting cell (APC). These truncated gene products, such as those with deletions or partial deletions of the cytoplasmic domain, are truncated such that they are capable of constitutive immunostimulatory signaling to a T-cell through co-stimulatory receptor engagement, but are unable to counter-regulatory signal to the APC, due to a deleted or truncated cytoplasmic domain.

[0686] As used herein, a “cytoplasmic domain deletion” is a deletion in all, or a portion of, the amino acid residues that comprise the cytoplasmic, or intracellular, domain of the protein, where the deletion is sufficient to effect constitutive immunostimulatory signaling to a T-cell through co-stimulatory receptor engagement, and is sufficient to inhibit counter-regulatory signaling to the APC. For example, the cytoplasmic domain of human 4-1BBL (also known as TNFSF9) comprises amino acid residues 1-28 of SEQ ID NO:342. The cytoplasmic domain of human CD80 comprises amino acid residues 264-288 of the protein; the cytoplasmic domain of human CD86 comprises amino acid residues 269-329 of the protein; the cytoplasmic domain of human CD27L (also known as CD70) comprises amino acid residues 1-17 of the protein; the cytoplasmic domain of human B7RP1 (also known as ICOSLG or ICOS ligand) comprises amino acid residues 278-302 of the protein; and the cytoplasmic domain of human OX40L (also known as TNFSF4 or CD252) comprises amino acid residues 1-23 of the protein.

[0687] As used herein, a “decoy receptor” is a receptor that can specifically bind to specific growth factors or cytokines efficiently, but is not structurally able to signal or activate the intended receptor complex. The decoy receptor acts as an inhibitor by binding to a ligand and preventing it from binding to its cognate receptor.

[0688] For example, TGF-β family receptors include the cell-surface serine/threonine kinase receptors type I (TβRI or TGFβR1) and type II (TβRII or TGFβR2), which form heteromeric complexes in the presence of dimerized ligands, as well as the type III receptor betaglycan (TβRIII or TGFβR3). Soluble decoy receptors for TGF-β, which prevent the binding of TGF-β to its receptors, include the soluble extracellular domains (the TGF-β binding regions) of TβRI, TβRII, or TPRIII (β-glycan), which can be fused with other molecules, such as an Fc domain. Additionally, BAMBI (bone morphogenetic protein (BMP) and activin membrane-bound inhibitor) is structurally related to type I receptors and acts as a decoy that inhibits receptor activation. A dominant negative TGFβR2 (dnTGFβRII), which comprises the extracellular domain of TGFβR2 and the transmembrane region, but which lacks the cytoplasmic domain required for signaling, also can be used as a TGF-β decoy receptor (see, e.g., International Application Publication No. WO 2018/138003).

[0689] As used herein, a co-stimulatory molecule agonist is a molecule that, upon binding to the co-stimulatory molecule, activates it or increases its activity. For example, the agonist can be an agonist antibody. CD40 agonist antibodies include, for example, CP-870,893, dacetuzumab, ADC-1013 (mitazalimab), and Chi Lob 7/4.

[0690] As used herein, a cytosolic DNA/RNA sensor pathway is one that is initiated by the presence of DNA, RNA, nucleotides, dinucleotides, cyclic nucleotides and/or cyclic dinucleotides or other nucleic acid molecules, that leads to production of type I interferon. The nucleic acid molecules in the cytosol occur from viral or bacterial or radiation or other such exposure, leading to activation of an immune response in a host.

[0691] As used herein, a “type I interferon pathway protein” is a protein that induces an innate immune response, such as the induction of type I interferon.

[0692] As used herein, a “cytosolic DNA/RNA sensor,” is a protein that is part of a cytosolic DNA/RNA sensor pathway that leads to expression of an immune response mediator, such as type I interferon. A “cytosolic DNA/RNA sensor,” includes type I interferon pathway proteins. For example, as described herein and known to those of skill in the art, cytosolic DNA is sensed by cGAS, leading to the production of cGAMP and subsequent STING/TBK1/IRF3 signaling, and type I IFN production. Bacterial cyclic dinucleotides (CDNs, such as bacterial cyclic di-AMP) also activate STING. Hence, STING is an immunomodulatory protein that induces type I interferon. 5′-triphosphate RNA and double stranded RNA are sensed by RIG-I and either MDA-5 alone, or MDA-5/LGP2. This leads to polymerization of mitochondrial MAVS (mitochondrial antiviral-signaling protein), and also activates TANK-binding kinase 1 (TBK1) and interferon regulatory factor 3 (IRF3). The proteins in such pathways are immunostimulatory proteins, and lead to the expression of innate immune response mediators, such as type I interferon. The immunomodulatory proteins in the DNA/RNA sensor pathways can be modified so that they have increased activity, or act constitutively in the absence of cytosolic nucleic acids and/or activating/stimulating ligands, to lead to the immune response, such as the expression of type I interferon.

[0693] As used herein, the “carboxy-terminal tail” or “C-terminal tail” (CTT) of the innate immune protein STING refers to the C-terminal portion of a STING protein that, in a wild-type STING protein, is tethered to the cGAMP-binding domain by a flexible linker region. The CTT includes an IRF3 binding site, a TBK1 binding site, and a TRAF6 binding site. STING promotes the induction of interferon beta (IFN-β) production via the phosphorylation of the STING protein C-terminal tail (CTT) by TANK-binding kinase 1 (TBK1). The interaction between STING and TBK1 is mediated by an evolutionarily conserved stretch of eight amino-acid residues in the carboxy-terminal tail (CTT) of STING. TRAF6 catalyzes the formation of K63-linked ubiquitin chains on STING, leading to the activation of the transcription factor NF-κB and the induction of an alternative STING-dependent gene expression program. Deletion or disruption of the TRAF6 binding site in the CTT can reduce activation of NF-κB signaling. Substitution of the human STING CTT (or portions thereof), with the CTT (or corresponding portion thereof) from the STING protein of a species with low NF-κB activation, can decrease the NF-κB activation by the resulting modified human STING protein. The STING CTT is an unstructured stretch of ˜40 amino acids that contains sequence motifs required for STING phosphorylation and recruitment of IRF3 (see, de Oliveira Mann et al. (2019) Cell Reports 27:1165-1175). Human STING residue S366 has been identified as a primary TBK1 phosphorylation site that is part of an LxIS motif shared among innate immune adaptor proteins that activate interferon signaling (see, de Oliveira Mann et al. (2019) Cell Reports 27:1165-1175). The human STING CTT contains a second PxPLR motif that includes the residue L374, which is required for TBK1 binding; the LxIS and PxPLR sequences are conserved among vertebrate STING alleles (see, de Oliveira Mann et al. (2019) Cell Reports 27:1165-1175). Exemplary STING CTT sequences, and the IRF3, TBK1, and TRAF6 binding sites, are set forth in the following table:

| | | SEQ | IRF3 | TBK1 | TRAF6 |
|---|---|---|---|---|---|
| | C-Terminal Tail (CTT) | ID | Binding | Binding | Binding |
| Species | Sequence | NO. | Site | Site | Site |
| Human | EKEEVTVGSLKTSAVPSTSTMS | 370 | PELLIS | PLPLRT | DFS |
| | QEPELLISGMEKPLPLRTDFS | | | | |
| Tasmanian | RQEEFAIGPKRAMTVTTSSTLS | 371 | PQLLIS | PLSLRT | DGF |
| devil | QEPQLLISGMEQPLSLRTDGF | | | | |
| Marmoset | EEEEVTVGSLKTSEVPSTSTMS | 372 | PELLIS | PLPLRS | DLF |
| | QEPELLISGMEKPLPLRSDLF | | | | |
| Cattle | EREVTMGSTETSVMPGSSVLS | 373 | PELLIS | PLPLRS | DVF |
| | QEPELLISGLEKPLPLRSDVF | | | | |
| Cat | EREVTVGSVGTSMVRNPSVLS | 374 | PNLLIS | PLPLRT | DVF |
| | QEPNLLISGMEQPLPLRTDVF | | | | |
| Ostrich | RQEEYTVCDGTLCSTDLSLQIS | 375 | LSLQIS | PQPLRS | DCL |
| | ESDLPQPLRSDCL | | | | |
| Boar | EREVTMGSAETSVVPTSSTLSQ | 376 | PELLIS | PLPLRS | DIF |
| | EPELLISGMEQPLPLRSDIF | | | | |
| Bat | EKEEVTVGTVGTYEAPGSSTL | 377 | PELLIS | PLPLRT | DIF |
| | HQEPELLISGMDQPLPLRTDIF | | | | |
| Manatee | EREEVTVGSVGTSVVPSPSSPS | 378 | PKLLIS | PLPLRT | DVF |
| | TSSLSQEPKLLISGMEQPLPLRT | | | | |
| | DVF | | | | |
| Crested ibis | CHEEYTVYEGNQPHNPSTTLH | 379 | LNL QIS | PQPLRS | DCF |
| | STELNLQISESDLPQPLRSDCF | | | | |
| Coelacanth | QKEEYFMSEQTQPNSSSTSCLS | 380 | PQLMIS | PHTLKR | QVC |
| (variant 1) | TEPQLMISDTDAPHTLKRQVC | | | | |
| Coelacanth | QKEEYFMSEQTQPNSSSTSCLS | 381 | PQLMIS | PHTLKS | GF |
| (variant 2) | TEPQLMISDTDAPHTLKSGF | | | | |
| Zebrafish | DGEIFMDPTNEVHPVPEEGPV | 382 | PTLMFS | PQSLRS | EPVE |
| | GNCNGALQATFHEEPMSDEPT | | | | TTDY |
| | LMFSRPQSLRSEPVETTDYFNP | | | | |
| | SSAMKQN | | | | |
| Ghost | LTEYPVAEPSNANETDCMSSE | 383 | PHLMIS | PKPLRS | YCP |
| shark | PHLMISDDPKPLRSYCP | | | | |
| Mouse | EKEEVTMNAPMTSVAPPPSVL | 384 | PRLLIS | PLPLRT | DLI |
| | SQEPRLLISGMDQPLPLRTDLI | | | | |

[0694] As used herein, a bacterium that is modified so that it “induces less cell death in tumor-resident immune cells” or “induces less cell death in immune cells” is one that is less toxic than the bacterium without the modification, or one that has reduced virulence compared to the bacterium without the modification. Exemplary of such modifications are those that eliminate pyroptosis in phagocytic cells and that alter lipopolysaccharide (LPS) profiles on the bacterium. These modifications include disruption of or deletion of flagellin genes, pagP, or one or more components of the SPI-1 pathway, such as hilA, rod protein (e.g., prgJ), needle protein (e.g., prgI), and QseC.

[0695] As used herein, a bacterium that is “modified so that it preferentially infects tumor-resident immune cells” or “modified so that it preferentially infects immune cells” has a modification in its genome that reduces its ability to infect cells other than immune cells. Exemplary of such modifications are modifications that disrupt the type Ill secretion system or type IV secretion system or other genes or systems that affect the ability of a bacterium to invade a non-immune cell. For example, modifications include disruption/deletion of an SPI-1 component, which is needed for infection of cells, such as epithelial cells, but does not affect infection of immune cells, such as phagocytic cells, by Salmonella.

[0696] As used herein, a “modification” is in reference to modification of a sequence of amino acids of a polypeptide, or a sequence of nucleotides in a nucleic acid molecule, and includes deletions, insertions, and replacements of amino acids or nucleotides, respectively. Methods of modifying a polypeptide are routine to those of skill in the art, such as by using recombinant DNA methodologies.

[0697] As used herein, a modification to a bacterial genome, or to a plasmid, or to a gene, includes deletions, replacements, and insertions of nucleic acid.

[0698] As used herein, RNA interference (RNAi) is a biological process in which RNA molecules inhibit gene expression or translation, by neutralizing targeted mRNA molecules to inhibit translation, and thereby expression, of a targeted gene.

[0699] As used herein, RNA molecules that act via RNAi are referred to as inhibitory by virtue of their silencing of the expression of a targeted gene. Silencing expression means that expression of the targeted gene is reduced, or suppressed, or inhibited.

[0700] As used herein, gene silencing via RNAi is said to inhibit, suppress, disrupt, or silence expression of a targeted gene. A targeted gene contains sequences of nucleotides that correspond to the sequences in the inhibitory RNA, whereby the inhibitory RNA silences expression of target mRNA.

[0701] As used herein, inhibiting, suppressing, disrupting, or silencing a targeted gene, refers to processes that alter expression, such as translation, of the targeted gene, whereby activity or expression of the product encoded by the targeted gene is reduced. Reduction, includes a complete knock-out or a partial knockout, whereby, with reference to the immunostimulatory bacteria provided herein and administration herein, treatment is effected.

[0702] As used herein, small interfering RNAs (siRNAs) are small pieces of double-stranded (ds) RNA, usually about 21 nucleotides long, with 3′ overhangs (2 nucleotides) at each end that can be used to “interfere” with the translation of proteins by binding to and promoting the degradation of messenger RNA (mRNA) at specific sequences. In doing so, siRNAs prevent the production of specific proteins based on the nucleotide sequences of their corresponding mRNAs. The process is called RNA interference (RNAi), and also is referred to as siRNA silencing, or siRNA knockdown.

[0703] As used herein, a short-hairpin RNA or small-hairpin RNA (shRNA) is an artificial RNA molecule with a tight hairpin turn that can be used to silence target gene expression via RNA interference (RNAi). Expression of shRNA in cells is typically accomplished by delivery of plasmids, or through viral or bacterial vectors.

[0704] As used herein, a tumor microenvironment (TME) is the cellular environment in which the tumor exists, including surrounding blood vessels, immune cells, fibroblasts, bone marrow-derived inflammatory cells, lymphocytes, signaling molecules and the extracellular matrix (ECM). Conditions that exist include, but are not limited to, increased vascularization, hypoxia, low pH, increased lactate concentration, increased pyruvate concentration, increased interstitial fluid pressure, and altered metabolites or metabolism, such as higher levels of adenosine, which are indicative of a tumor.

[0705] As used herein, an immune desert tumor or immune-excluded tumor is a tumor devoid of tumor infiltrating T-cells. Immune desert tumors are solid tumors where minimal effector immune cells infiltrate the tumor and there is a lack of immune response present in the tumor. Desert tumors are devoid tumor-infiltrating lymphocytes, CD8+ T-cells are absent from the tumor, including the parenchyma, stroma, and tumor periphery.

[0706] As used herein, “bactofection” refers to the bacteria-mediated transfer of genes or plasmid DNA into eukaryotic cells, such as mammalian cells.

[0707] As used herein, human type I interferons (IFNs) are a subgroup of interferon proteins that regulate the activity of the immune system. All type I IFNs bind to a specific cell surface receptor complex, such as the IFN-α receptor. Type I interferons include IFN-α and IFN-β, among others. Myeloid cells are the primary producers of IFN-α and IFN-β, which have antiviral activity that is involved mainly in innate immune responses. Two types of IFN-β are IFN-β1 (IFNB1) and IFN-β3 (IFNB3).

[0708] As used herein, “M1 macrophage phenotype” and “M2 macrophage phenotype” refer to the two broad groups into which macrophage phenotypes are divided: M1 (classically activated macrophages) and M2 (alternatively activated macrophages). The role of M1 macrophages is to secrete pro-inflammatory cytokines and chemokines, and to present antigens, so that they participate in the positive immune response, and function as an immune monitor. The main pro-inflammatory cytokines they produce are IL-6, IL-12, and TNF-alpha. M2 macrophages primarily secrete arginase-I, IL-10, TGF-β, and other anti-inflammatory cytokines, which have the function of reducing inflammation, and contributing to tumor growth and immunosuppressive function. A macrophage with an M1-like phenotype secretes pro-inflammatory cytokines, and does not have the immunosuppressive activity(ies) of an M2 macrophage. Conversion of an M2 macrophage into a macrophage with an M1 or M1-like phenotype converts an M2 macrophage into one that is not immunosuppressive, but participates in an anti-tumor response. An M2 macrophage that is converted into a macrophage with an M1 or M1-like phenotype exhibits the secretion/expression of more pro-inflammatory cytokines/chemokines and receptors, such as CD80 and CCR7, and chemokines, such as IFNγ and CXCL10. M1 phenotypic markers include, but are not limited to, one or more of CD80, CD86, CD64, CD16, and CD32. The expression of nitric oxide synthase (iNOS) in M1 macrophages also can serve as a phenotypic marker. CD163 and CD206 are major markers for the identification of M2 macrophages. Other surface markers for M2-type cells also include CD68. A reduction or elimination of any of the M2 markers, and an increase in cytokines/chemokines that are indicative of M1 macrophages, reflect a conversion from an M2 phenotype into an M1 or M1-like phenotype.

[0709] As used herein, an M1/M2 hybrid phenotype is anti-tumor phenotype that is achieved by treatment with therapeutics provided and described herein or that can be generated based on the disclosure herein. Post-treatment macrophage exhibit a hybrid of M1 and M2 phenotypes; macrophage with this phenotype have anti-tumor activity. In macrophage with hybrid M1/M2 phenotype, cell surface markers are upregulated relative to M1 macrophages and downregulated relative to an M2 phenotype, and upregulation of M1 inflammatory macrophage markers. Cell surface markers that are upregulated relative to M1 macrophage (downregulated relative M2) are CD206 and retention of CD209; upregulated M1 markers include CD80/CD86 co-stimulation and upregulation of M1 lymph node-homing (LN-homing) CCR7. There is an upregulation of all classically-associated M1 inflammatory macrophage markers, expression of pattern recognition receptors (PRRs), scavenging and phagocytic markers: C14, CD206, CD209, CD68, and CD163, attributed to M2 macrophages. Hence the resulting phenotype is a hybrid of M1 and M2 macrophage phenotypes The sections and Examples below provide a more detailed description and exemplification of this phenotype.

[0710] As used herein, recitation that a nucleic acid or encoded RNA targets a gene means that it inhibits or suppresses or silences expression of the gene by any mechanism. Generally, such nucleic acid includes at least a portion complementary to the targeted gene, where the portion is sufficient to form a hybrid with the complementary portion.

[0711] As used herein, “deletion,” when referring to a nucleic acid or polypeptide sequence, refers to the deletion of one or more nucleotides or amino acids compared to a sequence, such as a target polynucleotide, or polypeptide, or a native or wild-type sequence.

[0712] As used herein, “insertion,” when referring to a nucleic acid or amino acid sequence, describes the inclusion of one or more additional nucleotides or amino acids, within a target, native, wild-type or other related sequence. Thus, a nucleic acid molecule that contains one or more insertions compared to a wild-type sequence, contains one or more additional nucleotides within the linear length of the sequence.

[0713] As used herein, “additions” to nucleic acid and amino acid sequences describe addition of nucleotides or amino acids onto either termini compared to another sequence.

[0714] As used herein, “substitution” or “replacement” refers to the replacing of one or more nucleotides or amino acids in a native, target, wild-type or other nucleic acid or polypeptide sequence with an alternative nucleotide or amino acid, without changing the length (as described in numbers of nucleotides or residues) of the molecule. Thus, one or more substitutions in a molecule does not change the number of nucleotides or amino acid residues of the molecule. Amino acid replacements compared to a particular polypeptide can be expressed in terms of the number of the amino acid residue along the length of the polypeptide sequence.

[0715] As used herein, “at a position corresponding to,” or recitation that nucleotides or amino acid positions “correspond to” nucleotides or amino acid positions in a disclosed sequence, such as set forth in the Sequence Listing, refers to nucleotides or amino acid positions identified upon alignment with the disclosed sequence to maximize identity using a standard alignment algorithm, such as the GAP algorithm. By aligning the sequences, one skilled in the art can identify corresponding residues, for example, using conserved and identical amino acid residues as guides. In general, to identify corresponding positions, the sequences of amino acids are aligned so that the highest order match is obtained (see, e.g., Computational Molecular Biology, Lesk, A. M., ed., Oxford University Press, New York, 1988; Biocomputing. Informatics and Genome Projects, Smith, D. W., ed., Academic Press, New York, 1993; Computer Analysis of Sequence Data, Part I, Griffin, A. M., and Griffin, H. G., eds., Humana Press, New Jersey, 1994; Sequence Analysis in Molecular Biology, von Heinje, G., Academic Press, 1987; Sequence Analysis Primer, Gribskov, M. and Devereux, J., eds., M Stockton Press, New York, 1991; and Carrillo et al. (1988) SIAM J. Applied Math 48:1073).

[0716] As used herein, alignment of a sequence refers to the use of homology to align two or more sequences of nucleotides or amino acids. Typically, two or more sequences that are related by 50% or more identity are aligned. An aligned set of sequences refers to 2 or more sequences that are aligned at corresponding positions and can include aligning sequences derived from RNAs, such as ESTs and other cDNAs, aligned with a genomic DNA sequence. Related or variant polypeptides or nucleic acid molecules can be aligned by any method known to those of skill in the art. Such methods typically maximize matches, and include methods, such as using manual alignments, and by using the numerous alignment programs available (e.g., BLASTP) and others known to those of skill in the art. By aligning the sequences of polypeptides or nucleic acids, one skilled in the art can identify analogous portions or positions, using conserved and identical amino acid residues as guides. Further, one skilled in the art also can employ conserved amino acid or nucleotide residues as guides to find corresponding amino acid or nucleotide residues between and among human and non-human sequences. Corresponding positions also can be based on structural alignments, for example by using computer simulated alignments of protein structure. In other instances, corresponding regions can be identified. One skilled in the art also can employ conserved amino acid residues as guides to find corresponding amino acid residues between and among human and non-human sequences.

[0717] As used herein, a “property” of a polypeptide, such as an antibody, refers to any property exhibited by a polypeptide, including, but not limited to, binding specificity, structural configuration or conformation, protein stability, resistance to proteolysis, conformational stability, thermal tolerance, and tolerance to pH conditions. Changes in properties can alter an “activity” of the polypeptide. For example, a change in the binding specificity of the antibody polypeptide can alter the ability to bind an antigen, and/or various binding activities, such as affinity or avidity, or in vivo activities of the polypeptide.

[0718] As used herein, an “activity” or a “functional activity” of a polypeptide, such as an antibody, refers to any activity exhibited by the polypeptide. Such activities can be empirically determined. Exemplary activities include, but are not limited to, the ability to interact with a biomolecule, for example, through antigen-binding, DNA binding, ligand binding, or dimerization, or enzymatic activity, for example, kinase activity, or proteolytic activity. For an antibody (including antibody fragments), activities include, but are not limited to, the ability to specifically bind a particular antigen, affinity of antigen-binding (e.g., high or low affinity), avidity of antigen-binding (e.g., high or low avidity), on-rate, off-rate, effector functions, such as the ability to promote antigen neutralization or clearance, virus neutralization, and in vivo activities, such as the ability to prevent infection or invasion of a pathogen, or to promote clearance, or to penetrate a particular tissue or fluid or cell in the body. Activity can be assessed in vitro or in vivo using recognized assays, such as ELISA, flow cytometry, surface plasmon resonance or equivalent assays to measure on-rate or off-rate, immunohistochemistry and immunofluorescence histology and microscopy, cell-based assays, and binding assays (e.g., panning assays).

[0719] As used herein, “bind,” “bound,” or grammatical variations thereof, refers to the participation of a molecule in any attractive interaction with another molecule, resulting in a stable association in which the two molecules are in close proximity to one another. Binding includes, but is not limited to, non-covalent bonds, covalent bonds (such as reversible and irreversible covalent bonds), and includes interactions between molecules such as, but not limited to, proteins, nucleic acids, carbohydrates, lipids, and small molecules, such as chemical compounds, including drugs.

[0720] As used herein, “antibody” refers to immunoglobulins and immunoglobulin fragments, whether natural, or partially or wholly synthetically, such as recombinantly produced, including any fragment thereof containing at least a portion of the variable heavy chain and light region of the immunoglobulin molecule that is sufficient to form an antigen-binding site and, when assembled, to specifically bind an antigen. Hence, an antibody includes any protein having a binding domain that is homologous or substantially homologous to an immunoglobulin antigen-binding domain (antibody combining site). For example, an antibody refers to an antibody that contains two heavy chains (which can be denoted H and H′) and two light chains (which can be denoted L and L′), where each heavy chain can be a full-length immunoglobulin heavy chain or a portion thereof sufficient to form an antigen-binding site (e.g., heavy chains include, but are not limited to, V_{H} chains, V_{H}-C_{H}1 chains and V_{H}-C_{H}1-C_{H}2-C_{H}³ chains), and each light chain can be a full-length light chain or a portion thereof sufficient to form an antigen-binding site (e.g., light chains include, but are not limited to, V_{L} chains and V_{L}-C_{L} chains). Each heavy chain (H and H′) pairs with one light chain (L and L′, respectively). Typically, antibodies minimally include all or at least a portion of the variable heavy (V_{H}) chain and/or the variable light (V_{L}) chain. The antibody also can include all or a portion of the constant region.

[0721] For purposes herein, the term antibody includes full-length antibodies and portions thereof including antibody fragments, such as anti-CTLA-4 antibody fragments. Antibody fragments, include, but are not limited to, Fab fragments, Fab′ fragments, F(ab′)₂ fragments, Fv fragments, disulfide-linked Fvs (dsFvs), Fd fragments, Fd′ fragments, single-chain Fvs (scFvs), single-chain Fabs (scFabs), diabodies, anti-idiotypic (anti-Id) antibodies, or antigen-binding fragments of any of the above. Antibody also includes synthetic antibodies, recombinantly produced antibodies, multi-specific antibodies (e.g., bispecific antibodies), human antibodies, non-human antibodies, humanized antibodies, chimeric antibodies, and intrabodies. Antibodies provided herein include members of any immunoglobulin class (e.g., IgG, IgM, IgD, IgE, IgA and IgY), any subclass (e.g., IgG1, IgG2, IgG3, IgG4, IgA1, and IgA2), or sub-subclass (e.g., IgG2a and IgG2b). Antibodies for human therapy generally are human antibodies or are humanized.

[0722] As used herein, “antibody fragment(s)” refers to (i) monovalent and monospecific antibody derivatives that contain the variable heavy and/or light chains, or functional fragments of an antibody, and that lack an Fc part; and (ii) BiTE® antibodies (such as tandem scFvs), dual-affinity re-targeting antibodies (DARTs), other dimeric and multimeric antibodies, diabodies, and single-chain diabodies (scDBs). Thus, an antibody fragment includes, for example, a/an: Fab, Fab′, scFab, scFv, Fv fragment, nanobody (see, e.g., antibodies derived from Camelus bactriamus, Camelus dromedarius, or Lama paccos) (see, e.g., U.S. Pat. No. 5,759,808; and Stijlemans et al. (2004) J. Biol. Chem. 279:1256-1261), V_{HH}, single-domain antibody (dAb or sdAb), minimal recognition unit, single-chain diabody (scDb), BiTE® antibody, and DART antibody, and other antibody constructs that bind to antigens. Typically, the recited antibody fragments have a molecular weight below 60 kDa.

[0723] As used herein, “nucleic acid” refers to at least two linked nucleotides or nucleotide derivatives, including a deoxyribonucleic acid (DNA) and a ribonucleic acid (RNA), joined together, typically by phosphodiester linkages. Also included in the term “nucleic acid” are analogs of nucleic acids, such as peptide nucleic acid (PNA), phosphorothioate DNA, and other such analogs and derivatives, or combinations thereof. Nucleic acids also include DNA and RNA derivatives containing, for example, a nucleotide analog or a “backbone” bond other than a phosphodiester bond, for example, a phosphotriester bond, a phosphoramidate bond, a phosphorothioate bond, a thioester bond, or a peptide bond (peptide nucleic acid). The term also includes equivalents, derivatives, variants, and analogs of either RNA or DNA made from nucleotide analogs, and single-stranded (sense or antisense) and double-stranded nucleic acids. Deoxyribonucleotides include deoxyadenosine, deoxycytidine, deoxyguanosine, and deoxythymidine. For RNA, the uracil base is uridine.

[0724] As used herein, an isolated nucleic acid molecule is one which is separated from other nucleic acid molecules which are present in the natural source of the nucleic acid molecule. An “isolated” nucleic acid molecule, such as a cDNA molecule, can be substantially free of other cellular material, or culture medium when produced by recombinant techniques, or substantially free of chemical precursors or other chemicals when chemically synthesized. Exemplary isolated nucleic acid molecules provided herein include isolated nucleic acid molecules encoding an antibody or antigen-binding fragments provided herein.

[0725] As used herein, “operably linked” or “operatively linked,” with reference to nucleic acid sequences, regions, elements, or domains, means that the nucleic acid regions are functionally related to each other. It refers to a juxtaposition whereby the components so described are in a relationship permitting them to function in their intended manner. For instance, a promoter is operably linked to a coding sequence if the promoter effects or affects its transcription or expression. For example, a nucleic acid encoding a leader peptide can be operably linked to a nucleic acid encoding a polypeptide, whereby the nucleic acids can be transcribed and translated to express a functional fusion protein, wherein the leader peptide effects secretion of the fusion polypeptide. In some instances, the nucleic acid encoding a first polypeptide (e.g., a leader peptide) is operably linked to a nucleic acid encoding a second polypeptide, and the nucleic acids are transcribed as a single mRNA transcript, but translation of the mRNA transcript can result in one of two polypeptides being expressed. For example, an amber stop codon can be located between the nucleic acid encoding the first polypeptide and the nucleic acid encoding the second polypeptide, such that, when introduced into a partial amber suppressor cell, the resulting single mRNA transcript can be translated to produce either a fusion protein containing the first and second polypeptides, or can be translated to produce only the first polypeptide. In another example, a promoter can be operably linked to nucleic acid encoding a polypeptide, whereby the promoter regulates or mediates the transcription of the nucleic acid.

[0726] As used herein, “synthetic,” with reference to, for example, a synthetic nucleic acid molecule, or a synthetic gene, or a synthetic peptide, refers to a nucleic acid molecule, or a gene, or a polypeptide molecule that is produced by recombinant methods and/or by chemical synthesis methods.

[0727] As used herein, the residues of naturally occurring α-amino acids are the residues of those 20 α-amino acids found in nature which are incorporated into a protein by the specific recognition of the charged tRNA molecule with its cognate mRNA codon in humans.

[0728] As used herein, a “polypeptide” refers to two or more amino acids covalently joined. The terms “polypeptide” and “protein” are used interchangeably herein.

[0729] As used herein, a “peptide” refers to a polypeptide that is from 2 to about or 40 amino acids in length.

[0730] As used herein, an “amino acid” is an organic compound containing an amino group and a carboxylic acid group. A polypeptide contains two or more amino acids. For purposes herein, amino acids contained in the antibodies and immunostimulatory proteins provided herein, include the twenty naturally-occurring amino acids (see Table of Correspondence below), non-natural amino acids, and amino acid analogs (e.g., amino acids wherein the α-carbon has a side chain). As used herein, the amino acids, which occur in the various amino acid sequences of polypeptides appearing herein, are identified according to their well-known, three-letter or one-letter abbreviations (see Table of Correspondence below). The nucleotides, which occur in the various nucleic acid molecules and fragments, are designated with the standard single-letter designations used routinely in the art.

[0731] As used herein, “amino acid residue” refers to an amino acid formed upon chemical digestion (hydrolysis) of a polypeptide at its peptide linkages. The amino acid residues described herein are generally in the “L” isomeric form. Residues in the “D” isomeric form can be substituted for any L-amino acid residue, as long as the desired functional property is retained by the polypeptide. NH₂ refers to the free amino group present at the amino terminus of a polypeptide. COOH refers to the free carboxy group present at the carboxyl terminus of a polypeptide. In keeping with standard polypeptide nomenclature described in. J. Biol. Chem., 243:3557-59 (1968) and adopted at 37 C.F.R. §§ 1.821-1.822, abbreviations for amino acid residues are shown in the following Table:

Table of Correspondence

| SYMBOL | | |
|---|---|---|
| 1-Letter | 3-Letter | AMINO ACID |
| Y | Tyr | Tyrosine |
| G | Gly | Glycine |
| F | Phe | Phenylalanine |
| M | Met | Methionine |
| A | Ala | Alanine |
| S | Ser | Serine |
| I | Ile | Isoleucine |
| L | Leu | Leucine |
| T | Thr | Threonine |
| V | Val | Valine |
| P | Pro | Proline |
| K | Lys | Lysine |
| H | His | Histidine |
| Q | Gln | Glutamine |
| E | Glu | Glutamic acid |
| Z | Glx | Glutamic Acid and/or Glutamine |
| W | Trp | Tryptophan |
| R | Arg | Arginine |
| D | Asp | Aspartic acid |
| N | Asn | Asparagine |
| B | Asx | Aspartic Acid and/or Asparagine |
| C | Cys | Cysteine |
| X | Xaa | Unknown or other |

[0732] All sequences of amino acid residues represented herein by a formula have a left to right orientation in the conventional direction of amino-terminus to carboxyl-terminus. The phrase “amino acid residue” is defined to include the amino acids listed in the above Table of Correspondence, as well as modified, non-natural, and unusual amino acids. A dash at the beginning or end of an amino acid residue sequence indicates a peptide bond to a further sequence of one or more amino acid residues, or to an amino-terminal group such as NH₂, or to a carboxyl-terminal group such as COOH.

[0733] In a peptide or protein, suitable conservative substitutions of amino acids are known to those of skill in the art and generally can be made without altering a biological activity of a resulting molecule. Those of skill in the art recognize that, in general, single amino acid substitutions in non-essential regions of a polypeptide do not substantially alter biological activity (see, e.g., Watson et al., Molecular Biology of the Gene, 4th Edition, 1987, The Benjamin/Cummings Pub. Co., p. 224).

[0734] Such substitutions can be made in accordance with the exemplary substitutions set forth in the following Table:

Exemplary Conservative Amino Acid Substitution

| | Exemplary |
|---|---|
| | Conservative |
| Original Residue | Substitution(s) |
| Ala (A) | Gly; Ser |
| Arg (R) | Lys |
| Asn (N) | Gln; His |
| Cys (C) | Ser |
| Gln (Q) | Asn |
| Glu (E) | Asp |
| Gly (G) | Ala; Pro |
| His (H) | Asn; Gln |
| Ile (I) | Leu; Val |
| Leu (L) | Ile; Val |
| Lys (K) | Arg; Gln; Glu |
| Met (M) | Leu; Tyr; Ile |
| Phe (F) | Met; Leu; Tyr |
| Ser (S) | Thr |
| Thr (T) | Ser |
| Trp (W) | Tyr |
| Tyr (Y) | Trp; Phe |
| Val (V) | Ile; Leu |

[0735] Other substitutions also are permissible and can be determined empirically or in accord with other known conservative or non-conservative substitutions.

[0736] As used herein, “naturally occurring amino acids” refer to the 20 L-amino acids that occur in polypeptides.

[0737] As used herein, the term “non-natural amino acid” refers to an organic compound that has a structure similar to a natural amino acid, but that has been modified structurally to mimic the structure and reactivity of a natural amino acid. Non-naturally occurring amino acids thus include, for example, amino acids or analogs of amino acids other than the 20 naturally occurring amino acids and include, but are not limited to, the D-stereoisomers of amino acids. Exemplary non-natural amino acids are known to those of skill in the art, and include, but are not limited to, 2-Aminoadipic acid (Aad), 3-Aminoadipic acid (bAad), β-alanine/β-Amino-propionic acid (Bala), 2-Aminobutyric acid (Abu), 4-Aminobutyric acid/piperidinic acid (4Abu), 6-Aminocaproic acid (Acp), 2-Aminoheptanoic acid (Ahe), 2-Aminoisobutyric acid (Aib), 3-Aminoisobutyric acid (Baib), 2-Aminopimelic acid (Apm), 2,4-Diaminobutyric acid (Dbu), Desmosine (Des), 2,2′-Diaminopimelic acid (Dpm), 2,3-Diaminopropionic acid (Dpr), N-Ethylglycine (EtGly), N-Ethylasparagine (EtAsn), Hydroxylysine (Hyl), allo-Hydroxylysine (Ahyl), 3-Hydroxyproline (3Hyp), 4-Hydroxyproline (4Hyp), Isodesmosine (Ide), allo-Isoleucine (Aile), N-Methylglycine, sarcosine (MeGly), N-Methylisoleucine (MeIle), 6-N-Methyllysine (MeLys), N-Methylvaline (MeVal), Norvaline (Nva), Norleucine (Nle), and Ornithine (Orn).

[0738] As used herein, a DNA construct is a single-stranded or double-stranded, linear or circular DNA molecule that contains segments of DNA combined and juxtaposed in a manner not found in nature. DNA constructs exist as a result of human manipulation, and include clones and other copies of manipulated molecules.

[0739] As used herein, a DNA segment is a portion of a larger DNA molecule having specified attributes. For example, a DNA segment encoding a specified polypeptide is a portion of a longer DNA molecule, such as a plasmid or plasmid fragment, which, when read from the 5′ to 3′ direction, encodes the sequence of amino acids of the specified polypeptide.

[0740] As used herein, the term polynucleotide means a single- or double-stranded polymer of deoxyribonucleotides or ribonucleotide bases read from the 5′ to the 3′ end. Polynucleotides include RNA and DNA, and can be isolated from natural sources, synthesized in vitro, or prepared from a combination of natural and synthetic molecules. The length of a polynucleotide molecule is given herein in terms of nucleotides (abbreviated “nt”), or base pairs (abbreviated “bp”). The term nucleotides is used for single- and double-stranded molecules where the context permits. When the term is applied to double-stranded molecules, it is used to denote overall length and will be understood to be equivalent to the term base pairs. It will be recognized by those skilled in the art that the two strands of a double-stranded polynucleotide can differ slightly in length and that the ends thereof can be staggered; thus, all nucleotides within a double-stranded polynucleotide molecule cannot be paired. Such unpaired ends will, in general, not exceed 20 nucleotides in length.

[0741] As used herein, production by recombinant methods refers to the use of the well-known methods of molecular biology for expressing proteins encoded by cloned DNA.

[0742] As used herein, “heterologous nucleic acid” is nucleic acid that encodes products (i.e., RNA and/or proteins) that are not normally produced in vivo by the cell in which it is expressed, or nucleic acid that is in a locus in which it does not normally occur, or that mediates or encodes mediators that alter expression of endogenous nucleic acid, such as DNA, by affecting transcription, translation, or other regulatable biochemical processes. Heterologous nucleic acid, such as DNA, also is referred to as foreign nucleic acid. Any nucleic acid, such as DNA, that one of skill in the art would recognize or consider as heterologous or foreign to the cell in which it is expressed, is herein encompassed by heterologous nucleic acid; heterologous nucleic acid includes exogenously added nucleic acid that is also expressed endogenously. Heterologous nucleic acid is generally not endogenous to the cell into which it is introduced, but has been obtained from another cell, or prepared synthetically, or is introduced into a genomic locus in which it does not occur naturally, or its expression is under the control of regulatory sequences or a sequence that differs from the natural regulatory sequence or sequences.

[0743] Examples of heterologous nucleic acid herein include, but are not limited to, nucleic acid that encodes a protein in a DNA/RNA sensor pathway or a gain-of-function or constitutively active variant thereof, or an immunostimulatory protein, such as a cytokine, chemokine or co-stimulatory molecule, that confers or contributes to anti-tumor immunity in the tumor microenvironment. Other products, such as antibodies and fragments thereof, BiTEs®, decoy receptors, antagonizing polypeptides and RNAi, that confer or contribute to anti-tumor immunity in the tumor microenvironment, also are included. In the immunostimulatory bacteria, the heterologous nucleic acid generally is encoded on the introduced plasmid, but it can be introduced into the genome of the bacterium, such as a promoter that alters expression of a bacterial product. Heterologous nucleic acid, such as DNA, includes nucleic acid that can, in some manner, mediate expression of DNA that encodes a therapeutic product, or it can encode a product, such as a peptide or RNA, that in some manner mediates, directly or indirectly, expression of a therapeutic product.

[0744] As used herein, cell therapy involves the delivery of cells to a subject to treat a disease or condition. The cells, which can be allogeneic or autologous to the subject, are modified ex vivo, such as by infection of cells with immunostimulatory bacteria provided herein, so that they deliver or express products when introduced to a subject.

[0745] As used herein, genetic therapy involves the transfer of heterologous nucleic acid, such as DNA, into certain cells, such as target cells, of a mammal, particularly a human, with a disorder or condition for which such therapy is sought. The nucleic acid, such as DNA, is introduced into the selected target cells in a manner such that the heterologous nucleic acid, such as DNA, is expressed, and a therapeutic product(s) encoded thereby is (are) produced. Genetic therapy can also be used to deliver nucleic acid encoding a gene product that replaces a defective gene or supplements a gene product produced by the mammal or the cell in which it is introduced. The introduced nucleic acid can encode a therapeutic compound, such as a growth factor or inhibitor thereof, or a tumor necrosis factor or inhibitor thereof, such as a receptor thereof, that is not normally produced in the mammalian host or that is not produced in therapeutically effective amounts or at a therapeutically useful time. The heterologous nucleic acid, such as DNA, encoding the therapeutic product, can be modified prior to introduction into the cells of the afflicted host in order to enhance or otherwise alter the product or expression thereof. Genetic therapy can also involve delivery of an inhibitor or repressor or other modulator of gene expression.

[0746] As used herein, “expression” refers to the process by which polypeptides are produced by transcription and translation of polynucleotides. The level of expression of a polypeptide can be assessed using any method known in art, including, for example, methods of determining the amount of the polypeptide produced from the host cell. Such methods can include, but are not limited to, quantitation of the polypeptide in the cell lysate by ELISA, Coomassie blue staining following gel electrophoresis, Lowry protein assay, and Bradford protein assay.

[0747] As used herein, a “host cell” is a cell that is used to receive, maintain, reproduce and/or amplify a vector. A host cell also can be used to express the polypeptide encoded by the vector. The nucleic acid contained in the vector is replicated when the host cell divides, thereby amplifying the nucleic acid.

[0748] As used herein, a “vector” is a replicable nucleic acid from which one or more heterologous proteins can be expressed when the vector is transformed into an appropriate host cell. Reference to a vector includes those vectors into which a nucleic acid encoding a polypeptide or fragment thereof can be introduced, typically by restriction digest and ligation. Reference to a vector also includes those vectors that contain nucleic acid encoding a polypeptide, such as a modified anti-CTLA-4 antibody. The vector is used to introduce the nucleic acid encoding the polypeptide into the host cell for amplification of the nucleic acid, or for expression/display of the polypeptide encoded by the nucleic acid. The vectors typically remain episomal, but can be designed to effect integration of a gene or portion thereof into a chromosome of the genome. Also contemplated are vectors that are artificial chromosomes, such as yeast artificial chromosomes and mammalian artificial chromosomes. Selection and use of such vehicles are well-known to those of skill in the art. A vector also includes “virus vectors” or “viral vectors.” Viral vectors are engineered viruses that are operatively linked to exogenous genes to transfer (as vehicles or shuttles) the exogenous genes into cells.

[0749] As used herein, an “expression vector” includes vectors capable of expressing DNA that is operatively linked with regulatory sequences, such as promoter regions, that are capable of effecting expression of such DNA fragments. Such additional segments can include promoter and terminator sequences, and optionally can include one or more origins of replication, one or more selectable markers, an enhancer, a polyadenylation signal, and the like. Expression vectors are generally derived from plasmid or viral DNA, or can contain elements of both. Thus, an expression vector refers to a recombinant DNA or RNA construct, such as a plasmid, a phage, recombinant virus or other vector that, upon introduction into an appropriate host cell, results in expression of the cloned DNA. Appropriate expression vectors are well-known to those of skill in the art and include those that are replicable in eukaryotic cells and/or prokaryotic cells and those that remain episomal or those which integrate into the host cell genome.

[0750] As used herein, “primary sequence” refers to the sequence of amino acid residues in a polypeptide, or the sequence of nucleotides in a nucleic acid molecule.

[0751] As used herein, “sequence identity” refers to the number of identical or similar amino acids or nucleotide bases in a comparison between a test and a reference poly-peptide or polynucleotide. Sequence identity can be determined by sequence alignment of nucleic acid or protein sequences to identify regions of similarity or identity. For purposes herein, sequence identity is generally determined by alignment to identify identical residues. The alignment can be local or global. Matches, mismatches and gaps can be identified between compared sequences. Gaps are null amino acids or nucleotides inserted between the residues of aligned sequences so that identical or similar characters are aligned. Generally, there can be internal and terminal gaps. When using gap penalties, sequence identity can be determined with no penalty for end gaps (e.g., terminal gaps are not penalized). Alternatively, sequence identity can be determined without taking into account gaps, as the number of identical positions/length of the total aligned sequence×100.

[0752] As used herein, a “global alignment” is an alignment that aligns two sequences from beginning to end, aligning each letter in each sequence only once. An alignment is produced, regardless of whether or not there is similarity or identity between the sequences. For example, 50% sequence identity based on “global alignment” means that in an alignment of the full sequence of two compared sequences each of 100 nucleotides in length, 50% of the residues are the same. It is understood that global alignment also can be used in determining sequence identity even when the length of the aligned sequences is not the same. The differences in the terminal ends of the sequences will be taken into account in determining sequence identity, unless the “no penalty for end gaps” is selected. Generally, a global alignment is used on sequences that share significant similarity over most of their length. Exemplary algorithms for performing global alignment include the Needleman-Wunsch algorithm (Needleman et al. (1970) J. Mol. Biol. 48:443-453). Exemplary programs for performing global alignment are publicly available and include the Global Sequence Alignment Tool available at the National Center for Biotechnology Information (NCBI) website (ncbi.nlm.nih.gov/), and the program available at deepc2.psi.iastate.edu/aat/align/align.html.

[0753] As used herein, a “local alignment” is an alignment that aligns two sequences, but only aligns those portions of the sequences that share similarity or identity. Hence, a local alignment determines if sub-segments of one sequence are present in another sequence. If there is no similarity, no alignment will be returned. Local alignment algorithms include BLAST, or the Smith-Waterman algorithm (Adv. Appl. Math. 2:482 (1981)). For example, 50% sequence identity based on “local alignment” means that in an alignment of the full sequence of two compared sequences of any length, a region of similarity or identity of 100 nucleotides in length has 50% of the residues that are the same in the region of similarity or identity.

[0754] For purposes herein, sequence identity can be determined by standard alignment algorithm programs used with default gap penalties established by each supplier. Default parameters for the GAP program can include: (1) a unary comparison matrix (containing a value of 1 for identities and 0 for non-identities) and the weighted comparison matrix of Gribskov et al. (1986) Nucl. Acids Res. 14:6745-6763, as described by Schwartz and Dayhoff, eds., Atlas of Protein Sequence and Structure, National Biomedical Research Foundation, pp. 353-358 (1979); (2) a penalty of 3.0 for each gap and an additional 0.10 penalty for each symbol in each gap; and (3) no penalty for end gaps. Whether any two nucleic acid molecules have nucleotide sequences, or any two polypeptides have amino acid sequences that are at least 80%, 85%, 90%, 95%, 96%, 97%, 98%, or 99% “identical,” or other similar variations reciting a percent identity, can be determined using known computer algorithms based on local or global alignment (see, e.g., wikipedia.org/wiki/Sequence_alignment_software, providing links to dozens of known and publicly available alignment databases and programs). Generally, for purposes herein sequence identity is determined using computer algorithms based on global alignment, such as the Needleman-Wunsch Global Sequence Alignment tool available from NCBI/BLAST (blast.ncbi.nlm.nih.gov/Blast.cgi?CMD=Web&Page_TYPE=BlastHome); LAlign (William Pearson implementing the Huang and Miller algorithm (Adv. Appl. Math. (1991) 12:337-357)); and the program from Xiaoqui Huang available at deepc2.psi.iastate.edu/aat/align/align.html. Typically, the full-length sequence of each of the compared polypeptides or nucleotides is aligned across the full-length of each sequence in a global alignment. Local alignment also can be used when the sequences being compared are substantially the same length.

[0755] Therefore, as used herein, the term “identity” represents a comparison or alignment between a test and a reference polypeptide or polynucleotide. In one non-limiting example, “at least 90% identical to” refers to percent identities from 90°/a to 100% relative to the reference polypeptide or polynucleotide. Identity at a level of 90% or more is indicative of the fact that, assuming for exemplification purposes a test and reference polypeptide or polynucleotide length of 100 amino acids or nucleotides are compared, no more than 10% (i.e., 10 out of 100) of amino acids or nucleotides in the test polypeptide or polynucleotide differ from those of the reference polypeptide or polynucleotide. Similar comparisons can be made between a test and reference polynucleotide. Such differences can be represented as point mutations randomly distributed over the entire length of an amino acid sequence, or they can be clustered in one or more locations of varying length up to the maximum allowable, e.g., 10/100, amino acid differences (approximately 90% identity). Differences also can be due to deletions or truncations of amino acid residues. Differences are defined as nucleic acid or amino acid substitutions, insertions or deletions. Depending on the length of the compared sequences, at the level of homologies or identities above about 85-90%, the result can be independent of the program and gap parameters set; such high levels of identity can be assessed readily, often without relying on software.

[0756] As used herein, a “disease or disorder” refers to a pathological condition in an organism resulting from a cause or condition, including, but not limited to, infections, acquired conditions, and genetic conditions, and that is characterized by identifiable symptoms.

[0757] As used herein, “treating” a subject with a disease or condition means that the subject's symptoms are partially or totally alleviated, or remain static following treatment.

[0758] As used herein, “treatment” refers to any effects that ameliorate symptoms of a disease or disorder. Treatment encompasses prophylaxis, therapy and/or cure. Treatment also encompasses any pharmaceutical use of any immunostimulatory bacterium or composition provided herein.

[0759] As used herein, “prophylaxis” refers to prevention of a potential disease and/or a prevention of worsening of symptoms or of progression of a disease.

[0760] As used herein, “prevention” or prophylaxis, and grammatically equivalent forms thereof, refers to methods in which the risk or probability of developing a disease or condition is reduced and/or the severity or symptoms thereof is/are reduced.

[0761] As used herein, a “pharmaceutically effective agent” includes any therapeutic agent or bioactive agent, including, but not limited to, for example, anesthetics, vasoconstrictors, dispersing agents, and conventional therapeutic drugs, including small molecule drugs and therapeutic proteins.

[0762] As used herein, a “therapeutic effect” means an effect resulting from treatment of a subject that alters, typically improves or ameliorates, the symptoms of a disease or condition, or that cures a disease or condition.

[0763] As used herein, a “therapeutically effective amount” or a “therapeutically effective dose” refers to the quantity of an agent, compound, material, or composition containing a compound that is at least sufficient to produce a therapeutic effect following administration to a subject. Hence, it is the quantity necessary for preventing, curing, ameliorating, arresting, or partially arresting, a symptom of a disease or disorder.

[0764] As used herein, “therapeutic efficacy” refers to the ability of an agent, compound, material, or composition containing a compound to produce a therapeutic effect in a subject to whom the agent, compound, material, or composition containing a compound has been administered.

[0765] As used herein, a “prophylactically effective amount” or a “prophylactically effective dose” refers to the quantity of an agent, compound, material, or composition containing a compound, that when administered to a subject, will have the intended prophylactic effect, e.g., preventing or delaying the onset or reoccurrence, of disease or symptoms, reducing the likelihood of the onset or reoccurrence, of disease or symptoms, or reducing the incidence of viral infection. The full prophylactic effect does not necessarily occur by administration of one dose, and can occur only after administration of a series of doses. Thus, a prophylactically effective amount can be administered in one or more administrations.

[0766] As used herein, amelioration of the symptoms of a particular disease or disorder by a treatment, such as by administration of a pharmaceutical composition or other therapeutic, refers to any lessening, whether permanent or temporary, lasting or transient, of the symptoms, that can be attributed to or associated with administration of the composition or therapeutic.

[0767] As used herein, an “anti-cancer agent” or “an anti-cancer therapeutic” refers to any agent or therapeutic that is destructive or toxic, either directly or indirectly, to malignant cells and tissues. For example, anti-cancer agents include agents that kill cancer cells or otherwise inhibit or impair the growth of tumors or cancer cells. Exemplary anti-cancer agents are chemotherapeutic agents, and immunotherapeutic agents.

[0768] As used herein “therapeutic activity” refers to the in vivo activity of a therapeutic product, such as a polypeptide, a nucleic acid molecule, and other therapeutic molecules. Generally, the therapeutic activity is the activity that is associated with treatment of a disease or condition.

[0769] As used herein, the term “subject” refers to an animal, including a mammal, such as a human being.

[0770] As used herein, a “patient” refers to a human subject.

[0771] As used herein, “animal” includes any animal, such as, but not limited to, primates, including humans, gorillas and monkeys; rodents, such as mice and rats; fowl, such as chickens; ruminants, such as goats, cows, deer, and sheep; and pigs and other animals. Non-human animals exclude humans as the contemplated animal. The polypeptides provided herein are from any source, animal, plant, prokaryotic and fungal. Most polypeptides are of animal origin, including mammalian origin.

[0772] As used herein, a “composition” refers to any mixture. It can be a solution, suspension, liquid, powder, paste, aqueous, non-aqueous, or any combination thereof.

[0773] As used herein, a “combination” refers to any association between or among two or more items. The combination can be two or more separate items, such as two compositions or two collections, a mixture thereof, such as a single mixture of the two or more items, or any variation thereof. The elements of a combination are generally functionally associated or related.

[0774] As used herein, “combination therapy” refers to administration of two or more different therapeutics. The different therapeutic agents can be provided and administered separately, sequentially, intermittently, or can be provided in a single composition.

[0775] As used herein, a “kit” is a packaged combination that optionally includes other elements, such as additional reagents and instructions for use of the combination or elements thereof, for a purpose including, but not limited to, activation, administration, diagnosis, and assessment of a biological activity or property.

[0776] As used herein, a “unit dose form” refers to physically discrete units suitable for human and animal subjects and packaged individually, as is known in the art.

[0777] As used herein, a “single dosage formulation” refers to a formulation for direct administration.

[0778] As used herein, a “multi-dose formulation” refers to a formulation that contains multiple doses of a therapeutic agent and that can be directly administered to provide several single doses of the therapeutic agent. The doses can be administered over the course of minutes, hours, weeks, days, or months. Multi-dose formulations can allow dose adjustment, dose-pooling and/or dose-splitting. Because multi-dose formulations are used over time, they generally contain one or more preservatives to prevent microbial growth.

[0779] As used herein, an “article of manufacture” is a product that is made and sold.

[0780] As used throughout this application, the term is intended to encompass any of the compositions provided herein contained in articles of packaging.

[0781] As used herein, a “fluid” refers to any composition that can flow. Fluids thus encompass compositions that are in the form of semi-solids, pastes, solutions, aqueous mixtures, gels, lotions, creams, and other such compositions.

[0782] As used herein, an isolated or purified polypeptide or protein (e.g., an isolated antibody or antigen-binding fragment thereof) or a biologically-active portion thereof (e.g., an isolated antigen-binding fragment), is substantially free of cellular material or other contaminating proteins from the cell or tissue from which the polypeptide or protein is derived, or substantially free from chemical precursors or other chemicals when chemically synthesized. Preparations can be determined to be substantially free if they appear free of readily detectable impurities as determined by standard methods of analysis, such as thin layer chromatography (TLC), gel electrophoresis and high performance liquid chromatography (HPLC), that are used by those of skill in the art to assess such purity, or are sufficiently pure such that further purification does not detectably alter the physical and chemical properties, such as enzymatic and biological activities, of the substance. Methods for purification of the compounds to produce substantially chemically pure compounds are known to those of skill in the art. A substantially chemically pure compound, however, can be a mixture of stereoisomers. In such instances, further purification might increase the specific activity of the compound. As used herein, a “cellular extract” or “lysate” refers to a preparation or fraction which is made from a lysed or disrupted cell.

[0783] As used herein, “persistent viral infections” are those in which the virus is not cleared, but remains in specific cells of infected individuals. Persistent infections involve stages of silent and productive infection without rapidly killing or even producing excessive damage of the host cells. There are three types of overlapping persistent virus-host interactions that may be defined as latent, chronic, and slow infections. Diseases caused by persistent viral infections include acquired immunodeficiency syndrome (AIDS), AIDS-related complexes, chronic hepatitis, subacute sclerosing panencephalitis (chronic measles encephalitis), chronic papovavirus encephalitis (progressive multifocal leukoencephalopathy), spongiform encephalopathies (caused by prions), several herpesvirus-induced diseases, and some neoplasias. Viruses that cause these and other infections include, for example, herpesviruses, varicella-zoster virus (VZV), measles virus, human T-cell leukemia viruses (HTLVs), human immunodeficiency virus (HIV), human papovaviruses, human parvoviruses, human papillomaviruses, hepatitis viruses, adenoviruses, and parvoviruses.

[0784] As used herein, a “control” refers to a sample that is substantially identical to the test sample, except that it is not treated with a test parameter, or, if it is a plasma sample, it can be from a normal volunteer not affected with the condition of interest. A control also can be an internal control.

[0785] As used herein, the singular forms “a,” “an” and “the” include plural referents unless the context clearly dictates otherwise. Thus, for example, reference to a polypeptide, comprising “an immunoglobulin domain” includes polypeptides with one or a plurality of immunoglobulin domains.

[0786] As used herein, the term “or” is used to mean “and/or” unless explicitly indicated to refer to alternatives only or the alternatives are mutually exclusive.

[0787] As used herein, ranges and amounts can be expressed as “about” a particular value or range. “About” also includes the exact amount. Hence, “about 5 amino acids” means “about 5 amino acids” and also “5 amino acids.”

[0788] As used herein, “optional” or “optionally” means that the subsequently described event or circumstance does or does not occur, and that the description includes instances where said event or circumstance occurs and instances where it does not. For example, an optionally variant portion means that the portion is variant or non-variant.

[0789] As used herein, the abbreviations for any protective groups, amino acids and other compounds, are, unless indicated otherwise, in accord with their common usage, recognized abbreviations, or the IUPAC-IUB Commission on Biochemical Nomenclature (see, Biochem. (1972) 11(9):1726-1732).

[0790] As used herein, the cancers or tumors are identified herein according to the known abbreviations, as set forth in the table below:

| Abbreviation | Full name |
|---|---|
| ACC | Adenoid cystic carcinoma |
| BLCA | Bladder cancer |
| BRCA | Breast cancer |
| CESC | Cervical squamous carcinoma |
| CMS1-4 | Consensus Molecular Subtypes 1-4 |
| CRC | Colorectal cancer |
| COAD | colorectal adenocarcinoma |
| DLBC or DLBCL | Diffuse large B-cell lymphoma |
| ESCA | Esophageal cancer |
| GBM | Glioblastoma |
| HNSC | head and neck squamous carcinoma |
| HNSCC | head and neck squamous cell carcinoma |
| KICH | kidney chromophobe |
| KIRC | Kidney clear cell |
| KIRP | kidney renal papillary cancer |
| LAML | Chronic Myelogenous Leukemia |
| LIHC | liver hepatocellular carcinoma |
| LGG | low grade glioma |
| LUAD | lung adenocarcinoma |
| LUSC | Lung squamous carcinoma |
| MESO | Mesothelioma |
| NSCLC | Lung cancer |
| OV | Ovarian serous cystadenocarcinoma |
| PAAD | pancreatic adenocarcinoma |
| PCPG | Pheochromocytoma and Paraganglioma |
| PRAD | prostate cancer |
| READ | rectal adenocarcinoma cancer |
| SARC | Sarcoma |
| SCLC | small-cell lung cancer |
| SKCM | skin cutaneous melanoma |
| STAD | astric (stomach) adenocarcinoma |
| TGCT | Testicular Germ Cell Tumors |
| THCA | Thyroid cancer |
| THYM | Thymoma |
| TNBC | triple-negative breast cancer |
| UCEC | uterine corpus endometrial cancer |
| UCS | Uterine Carcinosarcoma |
| UVM | Uveal melanoma |

[0791] For clarity of disclosure, and not by way of limitation, the detailed description is divided into the subsections that follow.

### B. Overview of Immunostimulatory Bacteria for Therapy

[0792] The recognition that bacteria have anti-cancer activity goes back to the 1800s, when several physicians observed the regression of tumors in patients infected with Streptococcus pyogenes. William Coley began the first study utilizing bacteria for the treatment of end-stage cancers, and developed a vaccine composed of S. pyogenes and Serratia marcescens, which was successfully used to treat a variety of cancers, including sarcomas, carcinomas, lymphomas and melanomas. Since then, a number of bacterial species, including Clostridium, Mycobacterium, Bifidobacterium, Listeria monocytogenes and Escherichia, have been studied as sources of anti-cancer vaccines (See, e.g., International PCT Application Publication Nos. WO 1999/013053 and WO 2001/025399; Bermudes et al. (2002) Curr. Opin. Drug Discov. Devel. 5:194-199; Patyar et al. (2010) Journal of Biomedical Science 17:21; and Pawlek et al. (2003) Lancet Oncol. 4:548-556).

[0793] As a therapeutic platform, bacteria have several advantages over other therapies such as oncolytic viruses. Some bacterial species can be engineered to be orally and systemically (intravenously; IV) administered, they propagate readily in vitro and in vivo, and they can be stored and transported in a lyophilized state. Bacterial chromosomes readily can be manipulated as they lack exons, and the complete genomes for numerous strains have been fully characterized (Felgner et al. (2016) mBio 7(5):e01220-16). Many types of bacteria are cheaper and easier to produce than viruses, and proper delivery of engineered bacteria can be favorable over viral delivery because they do not permanently integrate into host cell genomes, they preferentially infect myeloid cells over epithelial cells, and they can be rapidly eliminated by antibiotics if necessary, rendering them safe.

[0794] Provided herein are immunostimulatory bacteria that are modified to exploit these advantageous properties. The bacteria provided herein are modified so that they infect and accumulate in the tumor microenvironment, particularly in tumor-resident immune cells (myeloid cells), such as tumor-associated macrophages (TAMs), dendritic cells (DCs), and myeloid-derived suppressor cells (MDSCs), and also are designed to express and deliver high levels of therapeutic proteins and combinations, particularly complementary combinations, thereof. As described herein, the immunostimulatory bacteria provided herein can be used as vaccines to prevent and/or treat cancers and also as vaccines against pathogens, including bacterial, viral, parasitic, and other pathogens. These uses rely on the ability of the immunostimulatory bacteria provided herein to accumulate in tumor-resident macrophage, and also, when administered in directly, such as by intramuscular or inhalation, to accumulate in phagocytic cell, to promote durable immune responses and immunity. The properties of the bacteria that are for treatment of cancer also are advantageous for their use as vaccines. These properties derive from genome modifications that reduce TLR2 and TLR4 and 5 responses, and other modifications, such as auxotrophies that permit growth in vitro, but reduce or eliminate growth in vivo, and also auxotrophies that can reduce immunosuppressive effects of accumulated nutrients in the tumor microenvironment, such as adenosine, and those genome modifications that eliminate immunosuppressive effects of bacterial enzymes, such as asparaginase, which can inactivate T-cells.

[0795] The immunostimulatory bacteria provided herein have advantageous properties that are superior to existing bacterial therapies, and also cell therapies, oncolytic virus therapies, and prior bacterial therapies. The immunostimulatory bacteria provided herein, while they can be administered by any suitable route, are suitable for systemic, such as intravenous, administration. As shown and described herein, the immunostimulatory bacteria provided herein can target major immune pathways.

[0796] Provided are immunostimulatory bacteria that can be used or adapted as an anti-cancer therapeutics as well as an anti-cancer vaccines and pathogen vaccines, and also RNA delivery vehicles. The particular use can be selected based on the particular genome modifications and payloads. Provided are immunostimulatory bacteria that delivers a genetic payload encoding one or more therapeutic products, including, for example, a truncated co-stimulatory molecule (receptor or ligand; e.g., 4-1BBL, CD80/CD86, CD27L, B7RP1, OX40L) with a complete or partial cytoplasmic domain deletion, for expression on an antigen-presenting cell (APC), where the truncated gene product is capable of constitutive immunostimulatory signaling to a T-cell through co-stimulatory receptor engagement, and is unable to counter-regulatory signal to the APC, due to a deleted or truncated cytoplasmic domain. The immunostimulatory bacteria can encode a plurality of products including those that constitutively induce type I interferon (IFN) and those that stimulate anti-viral type of immune responses, such as IL-15, particularly IL-15 provided a IL-15/IL-15R alpha chain complex (IL-15 complex), and engineered STING proteins that constitutively induce type I IFN, and also can be modified to have reduced NF-κB signaling to eliminate or reduce undesirable inflammatory responses.

[0797] The immunostimulatory bacteria can encode and express one or more of IL-2, IL-7, IL-12p70 (IL-12p40+IL-12p35), IL-12, IL-15, IL-15/IL-15Rα chain complex, IL-18, IL-21, IL-23, IL-36γ, interferon-α, interferon-β, IL-2 that has attenuated binding to IL-2Ra, IL-2 that is modified so that it does not bind to IL-2Ra, CXCL9, CXCL10, CXCL11, CCL3, CCL4, CCL5, cytosolic DNA/RNA sensors or type I IFN pathway proteins, such as gain-of-function of constitutively active STING, IRF3, IRF7, MDA5, or RIG-I variants (that induce Type I IFN), inhibitors of TGF-beta, such as TGF-β inhibitory antibodies, TGF-beta polypeptide antagonists, and TGF-beta binding decoy receptors, antibodies and fragments thereof, such as those targeting immune checkpoints and other anti-cancer targets such as VEGF and IL-6, co-stimulatory receptors/molecules, such as 4-1BBL, including 4-1BBL with the cytoplasmic domain deleted or truncated or otherwise eliminated, and others. The immunostimulatory bacteria also can encode and express a truncated co-stimulatory molecule (e.g., 4-1BBL, CD80/CD86, CD27L, B7RP1, OX40L) with a complete or partial cytoplasmic domain deletion, for expression on an antigen-presenting cell (APC), where the truncated gene product is capable of constitutive immuno-stimulatory signaling to a T-cell through co-stimulatory receptor engagement, and is unable to counter-regulatory signal to the APC, due to a deleted or truncated cytoplasmic domain. Other encoded therapeutic products include those referred to as bispecific T-cell engagers (commercially available under the trademark BiTEs®), such as DLL3×CD3 engagers, exemplified herein.

[0798] Combinations of such therapeutic products and agents can be expressed in a single therapeutic composition. By virtue of the modifications of the bacterial genome, the immunostimulatory bacteria exhibit tumor-specific localization and enrichment, and provide intravenous (IV) administration for activation of anti-tumor immune pathways that are otherwise toxic if systemically activated.

[0799] The immunostimulatory bacteria provided herein are genetically designed to be safe and to target tumors, the tumor microenvironment, and/or tumor-resident immune cells, and also to target phagocytic cells when administered as vaccines, such as by direct administration. The immunostimulatory bacteria provided herein include a combination of genomic modifications and other modifications, as well as encoded therapeutic products, that function in concert to provide immunostimulatory bacteria that accumulate in tumor-resident immune cells, and that persist sufficiently long enough to deliver therapeutic products, particularly combinations that induce or promote anti-cancer immune stimulation in tumors and the tumor microenvironment, without toxic side-effects, or with limited toxic side-effects. When delivered systemically, such as intravenously (IV), the immunostimulatory bacteria enrich in tumors, including in metastatic lesions; they provide efficient genetic transfer of immune payloads, specifically to tumor-resident myeloid cells, including tumor-associated macrophages (TAMs), myeloid-derived suppressor cells (MDSCs), and dendritic cells (DCs); they induce powerful, local immune responses, destroying tumors and vaccinating against future recurrence; and, when therapy is finished, they are naturally eliminated, such as by phagocytosis and destruction by the infected cells, or they can be destroyed rapidly by a course of antibiotics.

[0800] The immunostimulatory bacteria provided herein exhibit preferential accumulation in the tumor microenvironment and/or in tumor-resident immune cells due to a designed purine/adenosine auxotrophy, and exhibit an inability to replicate inside of phagocytic cells. Immunostimulatory bacteria that avoid inactivation by serum complement allow for the delivery of a variety of immunotherapeutic agents and therapeutic products at high concentrations, directly within the tumor microenvironment, while minimizing toxicity to normal tissues, and are provided herein.

[0801] For example, as described in more detail, such as in section C.9., the immunostimulatory bacteria provided herein include one or more modifications of the genome that render them msbB⁻/pagP⁻, which alters the lipid A in LPS, resulting in penta-acylation (wild-type lipid A has 6-7 fatty acid chains), reducing the TLR4 affinity; are adenosine/adenine auxotrophs, such as purI⁻; are asparaginase II (ansB⁻), which improves T-cell quality; are lacking in flagella (flagellin deficient); are deficient in genes/products that produce curli fimbriae, such as csgD⁻, which, among other properties, removes curli fimbriae; and include other optional genomic modifications, such as insertions, deletions, disruptions, and any other modification, so that the encoded product(s) is(are) not produced in active form, as discussed in detail herein. The immunostimulatory bacteria include a plasmid that encodes one or more therapeutic products, particularly anti-cancer products, under control of a eukaryotic promoter. These same modifications and properties render them useful as vaccines and as delivery vehicles for RNA, for use as cancer therapeutics and cancer vaccines, and pathogen vaccines, particularly when delivered by direct administration, such as by inhalation, and intramuscular (IM) injection, and other direct routes for delivery of payloads to phagocytic cells.

[0802] The immunostimulatory bacteria provided herein include genome modifications, such as deletions, disruptions, and other alterations that result in inactive encoded product(s), such as changing the orientation of all or part of the gene, so that functional gene product(s) is/are not expressed. Among the immunostimulatory bacteria provided are those that are modified so that the resulting bacteria are msbB⁻/purI⁻. In some embodiments, the bacteria are msbB⁻ and purI⁻, whereby the full length of at least the coding portion of the msbB and/or purI genes are/is deleted. The genome of the bacteria also can be modified so that the bacteria lack flagella. This is effected in bacteria that normally express flagella. In such bacteria, for example the fliC and fljB genes or other genes in Salmonella, or equivalent genes in other species to fliC and fljB, can be deleted or otherwise modified so that functional flagella are not expressed. The bacteria also can be modified so that they are adenosine auxotrophs, and/or are msbB⁻/pagP⁻. Also provided are immunostimulatory bacteria and pharmaceutical compositions containing them, where the bacteria do not express L-asparaginase IL, whereby the bacteria are ansB⁻. Elimination of the encoded asparaginase activity improves or retains T-cell viability/activity. Therapeutic bacteria, such as inactivated or attenuated bacteria that are used as vaccines, can be improved by modifying the genome to eliminate asparaginase activity. Exemplary of such vaccines is the Bacillus Calmette-Guérin (BCG) vaccine and related vaccines, used to immunize against tuberculosis. The BCG vaccine is known to have variable effectiveness; eliminating the asparaginase can improve the effectiveness of such vaccine because the endogenous bacterial asparaginase inhibits or reduces T-cell activity.

[0803] The immunostimulatory bacteria provided herein, that deliver therapeutic products (such as constitutively active STING variants and other immunomodulatory proteins and products), to the tumor-resident myeloid cells promote adaptive immunity and enhance T-cell function. The immunostimulatory bacteria lead to a complete remodeling of the immunosuppressive tumor microenvironment, towards an adaptive anti-tumor phenotype, and away from a bacterial phenotype, which is characterized by the promotion of innate immunity and the suppression of adaptive immunity. As described herein, these properties and payloads also can be exploited for use of the bacteria as vaccines and RNA delivery platforms.

[0804] Immunostimulatory bacteria provided herein can exhibit significantly more, such as at least about 100,000-fold greater, tumor infiltration and enrichment, compared to unmodified bacteria, or compared to strain VNP20009. For example, the bacteria provided herein contain genome modifications whereby they infect macrophage in tumors (and other phagocytic cells when administered as vaccines) to deliver their payload, such as the combination of engineered STING (see discussion throughout regarding the various engineered STING proteins, such as the human STING with gain-of-function mutations, such as N154S/R284G, to render induction of type I IFN constitutive, and the CTT from a non-human STING that has lower NF-κB signaling activity, such as the CTT from Tasmanian devil, compared to human STING, and IL-15 in various forms, particularly IL-15/IL-15R alpha chain complex (IL-15 complex). It is shown herein that this combination has synergistic effects, and results in high degree of T-cell, including CD4+ and CD8+ cells, infiltration of tumors. This combination is comprehensive immunotherapy by virtue of acting at numerous therapeutic intervention points. The immunostimulatory bacteria are consumed by tumor-activated macrophages (TAMs) delivering the plasmid into the host cells, which express the encoded products, such as the IL-15 and engineered STING.

[0805] The immunostimulatory bacteria provided herein are consumed by tumor-resident immune cells, and deliver their contents, including the plasmid encoding the therapeutic products, which are expressed and produced in the immune cells and tumor microenvironment, to generate anti-tumor immunity. The bacteria that are asd⁻ and that do not include a complementing gene encoded on the plasmid for expression under host cell control, do not replicate in the host. Bacteria are provided that are thyA⁻, by virtue of genome modifications, such as deletion, insertion, transposition, or modification resulting in inactive or missing gene product, requiring thymine supplementation for growth, similarly deliver payloads into phagocytic cells, but cannot replicate in such cells.

### 1. Bacterial Cancer Immunotherapy

[0806] Many solid tumor types have evolved a profoundly immunosuppressive microenvironment that renders them highly refractory to approved checkpoint therapies, such as anti-CTLA-4, anti-PD-1 and anti-PD-L1 therapies. One mechanism by which tumors have evolved resistance to checkpoint therapies is through their lack of intratumoral T-cells and tumor antigen cross-presenting dendritic cells (DCs), described as T-cell excluded, non-inflamed, or “cold tumors” (Sharma et al. (2017) Cell 168(4):707-723). For the small number of patients whose tumors are T-cell inflamed and respond to checkpoint immunotherapies, they often experience severe autoimmune toxicities, and many will eventually relapse and become checkpoint refractory (see, e.g., Buchbinder et al. (2015) J. Clin. Invest. 125:3377-3383; Hodi et al. (2010) N. Engl. J. Med. 363(8):711-723; and Chen et al. (2015) J. Clin. Invest. 125:3384-3391). Tumors initiate multiple mechanisms to evade immune surveillance, reprogram anti-tumor immune cells to suppress immunity, exclude and inactivate anti-tumor T-cells, and develop emerged resistance to the targeted cancer therapies (see, e.g., Mahoney et al. (2015) Nat. Rev. Drug Discov. 14(8):561-584). Solving this problem will require immunotherapies that can properly inflame these tumors, and generate anti-tumor immunity that can provide long-lasting tumor regressions. In addition, intratumoral therapies are intractable and will be quite limiting in a metastatic disease setting. Systemically-administered therapies that properly inflame each individual metastatic lesion and overcome multiple pathways of immunosuppression are required. By virtue of their ability to specifically target tumor-resident immune cells, and to express multiple complementary genetic payloads/therapeutic products, the immunostimulatory bacteria provided herein are designed to address these issues.

2. Prior Therapies that Target the Tumor Microenvironment

[0807] A number of therapies that target the tumor microenvironment (TME) and attempt to promote anti-tumor immunity have been developed. Each has its own challenges and shortcomings, which are addressed by the immunostimulatory bacteria provided herein.

a. Limitations of Autologous T-Cell Therapies

[0808] Several systemically-administered therapeutic platforms have been investigated clinically, with the goal of accessing the highly immunosuppressive tumor microenvironment and inducing the proper immune responses to inflame tumors and promote anti-tumor immunity. These platforms include chimeric antigen receptors T-cells (CAR-T cells), which are produced by harvesting T-cells from patients and re-engineering them to fuse the T-cell receptor to an antibody Ig variable extracellular domain specific for a particular tumor antigen. This confers upon the cells the antigen-recognition properties of antibodies with the cytolytic properties of activated T-cells (see, e.g., Sadelain et al. (2015) J. Clin. Invest. 125(9):3392-3400). Despite the promise and potency of this technology, such as the FDA approvals of the CD19 CAR-Ts tisagenlecleucel (such as those under the trademark Kymriah®) and axicabtagene ciloleucel (under the trademark Yescarta®), success has been limited to CD19⁺ hematopoietic malignancies, and at the cost of deadly immune-related adverse events (see, e.g., Jackson et al. (2016) Nat. Rev. Clin. Oncol. 13(6):370-383). Tumors can mutate rapidly to downregulate the targeted tumor antigens for solid tumors, including the antigen CD19, thereby fostering immune escape (see, e.g., Mardiana et al. (2019) Sci. Transl. Med. 11(495):eaaw2293). There is not a plethora of tumor-specific target antigens. Solid tumor targets that are not expressed in healthy tissue are a major impediment to CAR-T therapy. Beyond that, CAR-T therapies suffer from other impediments to accessing solid tumor microenvironments, due to the lack of sufficient T-cell chemokine gradients, which are required for proper T-cell infiltration into tumors. In addition, once they have infiltrated tumors, they are rapidly inactivated (see, e.g., Brown et al. (2019) Nat. Rev. Immunol. 19(2):73-74). Should the safety of CAR-T cells be significantly improved and the efficacy expanded to solid tumors, the feasibility and costs associated with these labor-intensive therapies still limit their broader adoption.

b. Viral Vaccine Platforms

[0809] Oncolytic viruses (OVs) have natural and engineered properties to induce tumor cell lysis, recruit T-cells to the tumor, and deliver genetic material that can be read by tumor cells to produce immunomodulatory proteins. For example, the oncolytic virus designated Talimogene laherparepvec (T-VEC), is a modified herpes simplex virus encoding anti-melanoma antigens and the cytokine GM-CSF (granulocyte-macrophage colony-stimulating factor), that is intratumorally administered. It is FDA-approved for metastatic melanoma (see, e.g., Bastin et al. (2016) Biomedicines 4(3):21). T-VEC has demonstrated clinical benefit for some melanoma patients, and with fewer immune toxicities than the immune checkpoint antibodies or the FDA-approved systemic cytokines, such as IL-2 and interferon-alpha (see, e.g., Kim et al. (2006) Cytokine Growth Factor Rev. 17(5):349-366; and Paul et al. (2015) Gene 567(2):132-137).

[0810] Oncolytic viruses (OVs) possess a number of limitations as anti-cancer therapies. First, oncolytic viruses are rapidly inactivated by the human complement system in blood. It has proven difficult to deliver enough virus through systemic administration to have a desired therapeutic effect. Intratumoral delivery is limiting in a metastatic setting (where lesions are spread throughout the body), is intractable for most solid tumor types (e.g., lung and visceral lesions), and requires interventional, guided radiology for injection, which limits repeat dosing. Viruses can be difficult to manufacture at commercial scale and to store. Most OV-based vaccines, such as those based on paramyxovirus, reovirus and picornavirus, among others, have similar limitations (see, e.g., Chiocca et al. (2014) Cancer Immunol. Res. 2(4):295-300). Oncolytic viruses are inherently immunogenic and rapidly cleared from human blood, and T-cells that traffic into the tumor have a much higher affinity for viral antigens over weaker tumor neoantigens (see, e.g., Aleksic et al. (2012) Eur. J. Immunol. 42(12):3174-3179). Thus, in addition to the recognized technical limitations of the platform, OVs can have limited capacity to stimulate durable anti-tumor immunity (see, e.g., Kedl et al. (2003) Curr Opinion Immunol. 15:120-127; and Aleksic et al., (2012) Eur. J. Immunol. 42:3174-3179, which show that TCRs that bind viral antigens have higher HLA-A2 affinity that those that bind cancer related antigens).

c. Bacterial Cancer Therapies

[0811] A number of bacterial species have demonstrated preferential replication within solid tumors when injected from a distal site in preclinical animal studies. These include, but are not limited to, species of Salmonella, Bifodobacterium, Clostridium, and Escherichia. The tumor-homing properties of the bacteria, combined with the host's innate immune response to the bacterial infection, can mediate an anti-tumor response. This tumor tissue tropism reduces the size of tumors to varying degrees. One contributing factor to the tumor tropism of these bacterial species is the ability to replicate in anoxic and hypoxic environments. A number of these naturally tumor-tropic bacteria have been further engineered to increase the potency of the anti-tumor response (reviewed in Zu et al. (2014) Crit. Rev. Microbiol. 40(3):225-235; and Felgner et al. (2017) Microbial Biotechnology 10(5):1074-1078). Despite proof-of-concept in animal studies, complement factors in human serum, that are not present in animal models, can inactivate the bacteria, limiting their use as therapies to treat cancer.

[0812] To be administered orally or systemically, the bacterial strains are attenuated so that they do not cause systemic disease and/or septic shock, but still maintain some level of infectivity for effective tumor colonization, and resistance to inactivation by complement. A number of different bacterial species, including Clostridium (see, e.g., Dang et al. (2001) Proc. Natl. Acad. Sci. U.S.A. 98(26):15155-15160; U.S. Patent Publication Nos. 2017/0020931 and 2015/0147315; and U.S. Pat. Nos. 7,344,710 and 3,936,354), Mycobacterium (see, e.g., U.S. Patent Publication Nos. 2015/0224151 and 2015/0071873), Bifidobacterium (see, e.g., Dang et al. (2001); and Kimura et al. (1980) Cancer Res. 40:2061-2068), Lactobacillus (see, e.g., Dang et al. (2001)), Listeria monocytogenes (see, e.g., Le et al. (2012) Clin. Cancer Res. 18(3):858-868; Starks et al. (2004) J. Immunol. 173:420-427; and U.S. Patent Publication No. 2006/0051380) and Escherichia coli (see, e.g., U.S. Pat. No. 9,320,787), have been studied as possible agents for anti-cancer therapy.

[0813] The immunostimulatory bacteria provided herein include genome modifications that address problems with prior bacteria developed for treating tumors. Modifications generally include changes in the genome that render a gene or gene product inactive. This can be effected by deleting a gene or a portion thereof, or disrupting a gene, or any other such change that results in an inactive product. The genome modifications improve the targeting to or accumulation of bacteria in the tumor microenvironment, and in particular, are designed so that the bacteria preferentially or only infect tumor-resident immune cells and do not infect healthy tissues, thereby decreasing toxicity and improving delivery of encoded products. The immunostimulatory bacteria also are designed to deliver therapeutic products, including combinations thereof, designed to eliminate immune suppressive effects of tumors, enhance a host's anti-tumor response, and provide anti-tumor products.

i. Listeria

[0814] Listeria monocytogenes, a live attenuated intracellular bacterium capable of inducing potent CD8⁺ T-cell priming to expressed tumor antigens in mouse models of cancer, has also been explored as a bacterial cancer vector (see, e.g., Le et al. (2012) Clin. Cancer Res. 18(3):858-868). In a clinical trial of the L. monocytogenes-based vaccine incorporating the tumor antigen mesothelin, together with an allogeneic pancreatic cancer-based GVAX vaccine in a prime-boost approach, a median survival of 6.1 months was noted in patients with advanced pancreatic cancer, versus a median survival of 3.9 months for patients treated with the GVAX vaccine alone (see, e.g., Le et al. (2015) J. Clin. Oncol. 33(12):1325-1333). These results were not replicated in a larger phase 2b study, however, pointing to the difficulties in humans of subverting peripheral immune surveillance towards low affinity tumor neoantigens. L. monocytogenes also has shown limited immune responses to the encoded tumor antigens due to the requirement for bacteria to be lysed after phagocytosis, a pre-requisite to efficient plasmid transfer, which has not been demonstrated to occur by L. monocytogenes in human macrophages.

ii. Salmonella Species

[0815] Salmonella is exemplary of the immunostimulatory bacteria provided herein. Salmonella enterica serovar Typhimurium (S. typhimurium) is exemplary of a bacterial species for use for delivery of proteins and nucleic acids, such as anti-cancer therapeutics. S. typhimurium is a Gram-negative facultative anaerobe, which preferentially accumulates in hypoxic and necrotic areas due to the availability of nutrients from tissue necrosis, the leaky tumor vasculature, and their increased likelihood to survive in the immunosuppressed tumor microenvironment (see, e.g., Baban et al. (2010) Bioengineered Bugs 1(6):385-394). As a facultative anaerobe, S. typhimurium is able to grow under aerobic and anaerobic conditions, and is therefore able to colonize both small tumors that are less hypoxic, and large tumors that are more hypoxic.

[0816] S. typhimurium transmission through the fecal-oral route causes localized gastrointestinal infections. The bacterium can also enter the bloodstream and lymphatic system, infecting systemic tissues such as the liver, spleen and lungs. Systemic administration of wild-type S. typhimurium overstimulates TNF-α and IL-6, leading to a cytokine cascade and septic shock, which, if left untreated, can be fatal. As a result, pathogenic bacterial strains, such as S. typhimurium, must be attenuated to prevent systemic infection, without completely suppressing their ability to effectively colonize tumor tissues. Attenuation often is achieved by mutating a cellular structure that can elicit an immune response through pathogen pattern recognition, such as the bacterial outer membrane, or by limiting the bacterium's ability to replicate in the absence of supplemental nutrients.

[0817] S. typhimurium is an intracellular pathogen that is rapidly taken up by phagocytic myeloid cells such as macrophages, or it can directly invade non-phagocytic cells, such as epithelial cells, through its Salmonella pathogenicity island 1 (SPI-1)-encoded type III secretion system (T3SS1). Once inside cells, it can replicate within a Salmonella-containing vacuole (SCV) through SPI-2 regulation, and can also escape into the cytosol of some epithelial cells (see, e.g., Agbor et al. (2011) Cell Microbiol. 13(12):1858-1869; and Galan and Wolf-Watz (2006) Nature 444:567-573). Genetically modified bacterial strains of S. typhimurium have been described as anti-tumor agents to elicit direct tumoricidal effects and/or to deliver tumoricidal molecules (see, e.g., Clairmont et al. (2000) J. Infect. Dis. 181:1996-2002; Bermudes, D. et al. (2002) Curr. Opin. Drug Discov. Devel. 5:194-199; Zhao, M. et al. (2005) Proc. Natl. Acad. Sci. U.S.A. 102:755-760; and Zhao, M. et al. (2006) Cancer Res. 66:7647-7652).

[0818] Various methods for attenuation of bacterial pathogens are known in the art. Auxotrophic mutations, for example, render bacteria incapable of synthesizing an essential nutrient, and deletions/mutations in genes such as aro, pur, gua, thy, nad and asd (see, e.g., U.S. Patent Publication No. 2012/0009153) are used. Nutrients produced by the biosynthesis pathways involving these genes are often unavailable in host cells, and as such, bacterial survival is challenging. For example, attenuation of Salmonella and other species can be achieved by deletion or disruption of the aroA gene, which is part of the shikimate pathway, connecting glycolysis to aromatic amino acid biosynthesis (see, e.g., Felgner et al. (2016) mBio 7(5):e01220-16). Deletion or disruption of aroA results in bacterial auxotrophy for aromatic amino acids and subsequent attenuation (see, e.g., U.S. Patent Publication Nos. 2003/0170276, 2003/0175297, 2012/0009153, and 2016/0369282; and International Application Publication Nos. WO 2015/032165 and WO 2016/025582). Similarly, other enzymes involved in the biosynthesis pathway for aromatic amino acids, including aroC and aroD have been deleted to achieve attenuation (see, e.g., U.S. Patent Publication No. 2016/0369282; and International Application Publication No. WO 2016/025582). For example, S. typhimurium strain SL7207 is an aromatic amino acid auxotroph (aroA⁻ mutant), and strains A1 and A1-R are leucine-arginine auxotrophs.

[0819] Mutations that attenuate bacteria also include, but are not limited to, mutations in genes that alter the biosynthesis of lipopolysaccharide (LPS), such as rfaL, rfaG, rfaH, rfaD, rfaP, rFb, rfa, msbB, htrB, firA, pagL, pagP, lpxR, arnT, eptA, and lpxT; mutations that introduce a suicide gene, such as sacB, nuk, hok, gef, kil, or phiA; mutations that introduce a bacterial lysis gene, such as hly and cly; mutations in genes that encode virulence factors, such as IsyA, pag, prg, iscA, virG, plc, and act; mutations in genes that modify the stress response, such as recA, htrA, htpR, hsp, and groEL; mutations in genes that disrupt the cell cycle, such as min; and mutations in genes that disrupt or inactivate regulatory functions, such as cya, crp, phoP/phoQ, and ompR (see, e.g., U.S. Patent Publication Nos. 2012/0009153, 2003/0170276, and 2007/0298012; U.S. Pat. No. 6,190,657; International Application Publication No. WO 2015/032165; Felgner et al. (2016) Gut Microbes 7(2):171-177; Broadway et al. (2014) J. Biotechnology 192:177-178; Frahm et al. (2015) mBio 6(2):e00254-15; Kong et al. (2011) Infection and Immunity 79(12):5027-5038; and Kong et al. (2012) Proc. Natl. Acad. Sci. U.S.A. 109(47):19414-19419). In general, attenuating mutations are gene deletions to prevent spontaneous compensatory mutations that might result in reversion to a virulent phenotype.

[0820] Another way to attenuate S. typhimurium for safety is to use the PhoP/PhoQ operon system, which is a typical bacterial two-component regulatory system, composed of a membrane-associated sensor kinase (PhoQ), and a cytoplasmic transcriptional regulator (PhoP) (see, e.g., Miller, S. I. et al. (1989) Proc. Natl. Acad. Sci. U.S.A. 86:5054-5058; and Groisman, E. A. et al. (1989) Proc. Natl. Acad. Sci. U.S.A. 86:7077-7081). PhoP/PhoQ is required for virulence; its deletion results in poor survival of this bacterium in macrophages, and a marked attenuation in mice and humans (see, e.g., Miller, S. I. et al. (1989) Proc. Natl. Acad. Sci. U.S.A. 86:5054-5058; Groisman, E. A. et al. (1989) Proc. Natl. Acad. Sci. U.S.A. 86:7077-7081; Galan, J. E. and Curtiss, R. III. (1989) Microb. Pathog. 6:433-443; and Fields, P. I. et al. (1986) Proc. Natl. Acad. Sci. U.S.A. 83:5189-5193). PhoP/PhoQ deletion strains have been employed as vaccine delivery vehicles (see, e.g., Galan, J. E. and Curtiss, R. III. (1989) Microb. Pathog. 6:433-443; Fields, P. I. et al. (1986) Proc. Natl. Acad. Sci. U.S.A. 83:5189-5193; and Angelakopoulos, H. and Hohmann, E. L. (2000) Infect. Immun. 68:2135-2141). As described herein, however, it is disadvantageous for a strain to have limited survival in macrophages if the bacteria are not attempting to transfer plasmids.

[0821] These attenuated bacterial strains have been found to be safe in mice, pigs, and monkeys when administered intravenously (IV) (see, e.g., Zhao, M. et al. (2005) Proc. Natl. Acad. Sci. U.S.A. 102:755-760; Zhao, M. et al. (2006) Cancer Res. 66:7647-7652; Tjuvajev J. et al. (2001) J. Control. Release 74:313-315; and Zheng, L. et al. (2000) Oncol. Res. 12:127-135), and certain live attenuated Salmonella strains have been shown to be well tolerated after oral administration in human clinical trials (see, e.g., Chatfield, S. N. et al. (1992) Biotechnology 10:888-892; DiPetrillo, M. D. et al. (1999) Vaccine 18:449-459; Hohmann, E. L. et al. (1996) J. Infect. Dis. 173:1408-1414; and Sirard, J. C. et al. (1999) Immunol. Rev. 171:5-26).

[0822] Other strains of S. typhimurium that have been attenuated for therapy are, for example, the leucine-arginine auxotroph A-1 (see, e.g., Zhao et al. (2005) Proc. Natl. Acad. Sci. U.S.A. 102(3):755-760; Yu et al. (2012) Scientific Reports 2:436; U.S. Pat. No. 8,822,194; and U.S. Patent Publication No. 2014/0178341) and its derivative AR-1 (see, e.g., Yu et al. (2012) Scientific Reports 2:436; Kawaguchi et al. (2017) Oncotarget 8(12):19065-19073; Zhao et al. (2006) Cancer Res. 66(15):7647-7652; Zhao et al. (2012) Cell Cycle 11(1):187-193; Tome et al. (2013) Anticancer Research 33:97-102; Murakami et al. (2017) Oncotarget 8(5):8035-8042; Liu et al. (2016) Oncotarget 7(16):22873-22882; and Binder et al. (2013) Cancer Immunol. Res. 1(2):123-133); the aroA⁻ mutant S. typhimurium strain SL7207 (see, e.g., Guo et al. (2011) Gene Therapy 18:95-105; and U.S. Patent Publication Nos. 2012/0009153, 2016/0369282 and 2016/0184456), and its obligate anaerobe derivative YB1 (see, e.g., International Application Publication No. WO 2015/032165; Yu et al. (2012) Scientific Reports 2:436; and Leschner et al. (2009) PLoS ONE 4(8):e6692); the aroA⁻/aroD⁻ mutant S. typhimurium strain BRD509, a derivative of the SL1344 (wild-type) strain (see, e.g., Yoon et al. (2017) Eur. J. Cancer 70:48-61); the asd⁻/cya⁻/crp⁻ mutant S. typhimurium strain χ4550 (see, e.g., Sorenson et al. (2010) Biologics: Targets & Therapy 4:61-73) and the phoP⁻/phoQ⁻ S. typhimurium strain LH430 (see, e.g., International Application Publication No. WO 2008/091375).

[0823] Attenuation, however, impacts the ability of the bacteria to accumulate in tumor-resident immune cells, the tumor microenvironment, and tumor cells. This problem is solved herein. The immunostimulatory bacteria, such as the Salmonella strains exemplified herein, are attenuated by virtue of modifications, that can include some of those described above, but also have other modifications and properties described herein that enhance the effectiveness as a cancer therapeutic.

[0824] Attenuated strains of S. typhimurium possess the innate ability to deliver DNA following phagocytosis and degradation (see, e.g., Weiss, S. (2003) Int. J. Med. Microbiol. 293(1):95-106). They have been used as vectors for gene therapy. For example, S. typhimurium strains have been used to deliver and express a variety of genes, including those that encode cytokines, angiogenesis inhibitors, toxins and prodrug-converting enzymes (see, e.g., U.S. Patent Publication No. 2007/0298012; Loeffler et al. (2008) Cancer Gene Ther. 15(12):787-794; Loeffler et al. (2007) Proc. Natl. Acad. Sci. U.S.A. 104(31):12879-12883; Loeffler et al. (2008) J. Natl. Cancer Inst. 100:1113-1116; Clairmont, C. et al. (2000) J. Infect. Dis. 181:1996-2002; Bermudes, D. et al. (2002) Curr. Opin. Drug Discov. Devel. 5:194-199; Zhao, M. et al. (2005) Proc. Natl. Acad. Sci. U.S.A. 102:755-760; Zhao, M. et al. (2006) Cancer Res. 66:7647-7652; and Tjuvajev J. et al. (2001) J. Control. Release 74:313-315).

[0825] S. typhimurium has been modified to deliver the tumor-associated antigen (TAA) survivin (SVN) to antigen presenting cells (APCs) to prime adaptive immunity (see, e.g., U.S. Patent Publication No. 2014/0186401; and Xu et al. (2014) Cancer Res. 74(21):6260-6270). SVN is an inhibitor of apoptosis protein (IAP), which prolongs cell survival and provides cell cycle control, and is overexpressed in all solid tumors and poorly expressed in normal tissues. This technology uses SPI-2 and its type III secretion system to deliver the TAAs into the cytosol of APCs, which then are activated to induce TAA-specific CD8⁺ T-cells and anti-tumor immunity (see, e.g., Xu et al. (2014) Cancer Res. 74(21):6260-6270). Similar to the Listeria-based TAA vaccines, this approach has shown promise in mouse models, but has not demonstrated effective tumor antigen-specific T-cell priming in humans.

[0826] In addition to the delivery of DNA that encodes proteins, S. typhimurium also has been used for the delivery of small interfering RNAs (siRNAs) and short hairpin RNAs (shRNAs) for cancer therapy. For example, attenuated S. typhimurium has been modified to express certain shRNAs, such as those that target the immunosuppressive gene indolamine dioxygenase (IDO). Silenced IDO expression in a murine melanoma model resulted in tumor cell death and significant tumor infiltration by neutrophils (see, e.g., Blache et al. (2012) Cancer Res. 72(24):6447-6456; International Application Publication No. WO 2008/091375; and U.S. Pat. No. 9,453,227). Co-administration of this vector with a hyaluronidase showed positive results in the treatment of murine pancreatic ductal adenocarcinoma (see, e.g., Manuel et al. (2015) Cancer Immunol. Res. 3(9):1096-1107; and U.S. Patent Publication No. 2016/0184456). In another study, an S. typhimurium strain attenuated by a phoP/phoQ deletion, and expressing a signal transducer and activator of transcription 3 (STAT3)-specific shRNA, inhibited tumor growth and reduced the number of metastatic organs, extending the life of C57BL/6 mice (see, e.g., Zhang et al. (2007) Cancer Res. 67(12):5859-5864). In another example, S. typhimurium strain SL7207 has been used for the delivery of shRNA targeting CTNNB1, the gene that encodes β-catenin (see, e.g., Guo et al. (2011) Gene Therapy 18:95-105; and U.S. Patent Publication Nos. 2009/0123426 and 2016/0369282). The S. typhimurium strain VNP20009 has been used for the delivery of shRNA targeting STAT3 (see, e.g., Manuel et al. (2011) Cancer Res. 71(12):4183-4191; U.S. Patent Publication Nos. 2009/0208534, 2014/0186401 and 2016/0184456; and International Application Publication Nos. WO 2008/091375 and WO 2012/149364). siRNAs targeting the autophagy genes Atg5 and Beclin1 have been delivered to tumor cells using S. typhimurium strains A1-R and VNP20009 (see, e.g., Liu et al. (2016) Oncotarget 7(16):22873-22882).

[0827] It has been found, however, that these strains do not effectively stimulate an anti-tumor immune response, nor effectively colonize tumors for delivery of therapeutic doses of encoded products. Improvement of such strains was needed so that they more effectively stimulate an anti-tumor immune response.

[0828] Immunostimulatory bacteria, and therapeutics, provided herein as well as the description and findings demonstrating the requisites for conversion macrophage phenotypes to an anti-tumor phenotype (M1/M2 hybrid phenotype) and the properties of such immunostimulatory bacteria and therapeutics, address this problem. Additional and alternative modifications of various bacteria have been described in published International PCT Application No. WO 2019/014398 and in U.S. Publication No. 2019/0017050 A1. The bacteria described in each of these publications, also described herein, can be modified as described herein to further improve their immunostimulatory and tumor-targeting properties.

iii. VNP20009 (YS1646)

[0829] Exemplary of a therapeutic bacterium that can be used as a starting strain for modification(s) as described herein is the strain designated as VNP20009 (ATCC #202165, YS1646). This virus was a clinical candidate. VNP20009 (ATCC #202165, YS1646) was at least 50,000-fold attenuated for safety by deletion of the msbB and purI genes (see, e.g., Clairmont et al. (2000) J. Infect. Dis. 181:1996-2002; Low et al. (2003) Methods in Molecular Medicine, Vol. 90, Suicide Gene Therapy: Methods and Reviews, pp. 47-59; and Lee et al. (2000) International Journal of Toxicology 19:19-25). Deletion or disruption to prevent expression of the msbB gene alters the composition of the lipid A domain of lipopolysaccharide, the major component of Gram-negative bacterial outer membranes (see, e.g., Low et al. (1999) Nat. Biotechnol. 17(1):37-41). This prevents lipopolysaccharide-induced septic shock, attenuating the bacterial strain and lowering systemic toxicity, while reducing the potentially harmful production of TNFα (see, e.g., Dinarello, C. A. (1997) Chest 112(6 Suppl):321S-329S; and Low et al. (1999) Nat. Biotechnol. 17(1):37-41). Deletion or disruption to prevent expression of the purI gene renders the bacteria auxotrophic for purines, which further attenuates the bacteria and enriches them in the tumor microenvironment (see, e.g., Pawelek et al. (1997) Cancer Res. 57:4537-4544; and Broadway et al. (2014) J. Biotechnology 192:177-178).

[0830] As described, inventors herein found that VNP20009 also is auxotrophic for the immunosuppressive nucleoside adenosine. Adenosine can accumulate to pathologically high levels in the tumor and contribute to an immunosuppressive tumor microenvironment (see, e.g., Peter Vaupel and Arnulf Mayer, Oxygen Transport to Tissue XXXVII, Advances in Experimental Medicine and Biology 876 chapter 22, pp. 177-183). In strains provided herein, adenosine auxotrophy is included either by virtue of the purI⁻ phenotype or other genome modification, in order to exploit the benefits of adenosine auxotrophy in the tumor microenvironment, which can accumulate adenosine, which is immunosuppressive. Immunostimulatory bacteria that are auxotrophic for adenosine can reduce or eliminate excess adenosine to thereby ameliorate its immunosuppressive effects.

[0831] When VNP20009 was administered into mice bearing syngeneic or human xenograft tumors, the bacteria accumulated preferentially within the extracellular components of tumors at ratios exceeding 300-1000 to 1, and demonstrated tumor growth inhibition, as well as prolonged survival compared to control mice (see, e.g., Clairmont et al. (2000) J. Infect. Dis. 181:1996-2002). VNP20009 demonstrated success in tumor targeting and tumor growth suppression in animal models, while eliciting very little toxicity (see, e.g., Broadway et al. (2014) J. Biotechnology 192:177-178; Loeffler et al. (2007) Proc. Natl. Acad. Sci. U.S.A. 104(31):12879-12883; Luo et al. (2002) Oncology Research 12:501-508; and Clairmont et al. (2000) J. Infect. Dis. 181:1996-2002).

[0832] VNP20009 failed clinical trials. Results from the Phase 1 clinical trial in human metastatic melanoma revealed that, while VNP20009 was relatively safe and well tolerated, very limited anti-tumor activity was observed (see, e.g., Toso et al. (2002) J. Clin. Oncol. 20(1):142-152). The use of VNP20009 resulted in no significant changes in metastatic disease burden, but it did demonstrate evidence of tumor colonization at the maximum tolerated dose (MTD). Higher doses, which would be required to effect any anti-tumor activity, were not possible due to toxicity that correlated with high levels of pro-inflammatory cytokines.

[0833] The immunostimulatory bacteria provided and described herein provide numerous improvements and advantages that strain VNP20009 lacks. For exemplified strains, the VNP20009 strain (YS1646) can be used as the parental strain that is further modified by introduction of additional genome modifications, including those that eliminate flagella. The strain also is improved by completely deleting purI and/or msbB. Other genome modifications include elimination or inactivation of the curli fimbriae, such as by rendering the strain csgD⁻, and, optionally, rendering the strain thyA⁻, so that the bacteria do not replicate in vivo, and/or ansB⁻ to eliminate asparaginase activity, which inactivates or reduces activity of T-cells. These genome modifications individually and together improve the ability of the bacteria to accumulate in or infect phagocytic cells, and also to increase a host's anti-viral type immune response. The immunostimulatory bacteria are modified to include various payloads that stimulate the immune system and/or reduce immunosuppression and provide therapeutic products and immunizing antigens and products.

[0834] The immunostimulatory bacteria deliver encoded genetic payloads in a tumor-specific manner, to tumor-resident myeloid cells. The immunostimulatory bacteria, by virtue of the genomic modifications, such as deletions or disruptions of genes and/or transpositions (or any mutation results in an inactive product encoded by a gene locus), and other modifications of the genome, exhibit reduced TLR2-, TLR4-, and TLR5-mediated inflammation, for example, by virtue of the elimination of the flagella, the modifications of the LPS, and the elimination of the curli fimbriae and reduced biofilm formation. As shown and described herein, elimination of TLR2-mediated, and also of TLR2/4/5-mediated activities and response promotes or enhances type I interferon production and/or reduces any reduction or inhibition of type I IFN that occurs when these receptors are activated or by virtue of TLR responses. The immunostimulatory bacteria enhance T-cell function and activities and effects, such as by virtue of the elimination of the expression of L-asparaginase II, and facilitate, provide, permit, and support plasmid maintenance. The bacteria accumulate in (or target) only, or substantially only, myeloid cells, particularly tumor-resident myeloid cells, providing highly efficient plasmid delivery after phagocytosis. The immunostimulatory bacteria provided herein colonize the tumor microenvironment, and can be administered systemically. The immunostimulatory bacteria provided herein exhibit at least 15-fold improved LD₅₀ compared to VNP20009. Thus, a much higher dose, if needed, of the immunostimulatory bacteria provided herein can be administered without toxic effects, compared to VNP20009 (see, e.g., the table below in the section F.5. describing exemplary dosages and administration).

[0835] It is shown and described herein that immunostimulatory bacteria modified as described herein, including elimination of flagella, LPS modifications, and other modifications, preferentially accumulate in or target myeloid cells, particularly tumor-resident myeloid cells. The Examples demonstrate that the immunostimulatory bacteria accumulate in such cells following systemic, such as intravenous, administration. The Examples also describe and show plasmid transfer from the immunostimulatory bacteria into tumor-resident myeloid cells, and durable protein expression following bacterial cell death, thereby delivering therapeutic products, including products that result in an anti-cancer response and phenotype.

iv. Wild-Type Strains

[0836] Accumulation of VNP20009 in tumors results from a combination of factors including: the inherent invasiveness of the parental strain, ATCC 14028, its ability to replicate in hypoxic environments, and its requirement for high concentrations of purines that are present in the interstitial fluid of tumors. As described herein, it is not necessary to use an attenuated strain, such as VNP20009, as a starting bacterial strain. By virtue of the modifications described herein, the bacteria are rendered non-toxic or attenuated. The parental strain, ATCC 14028, or another wild-type strain, can be used as a starting strain, and modified as described herein. As described herein, the immunostimulatory bacteria provided herein, by virtue of genome modifications, infiltrate and colonize tumors and tumor-resident immune cells, and also tumor-resident macrophages. When used as vaccines in subjects who do not have tumors, the bacteria accumulate in phagocytic cells, such as macrophages.

### 3. Limitations of Prior Bacterial Cancer Immunotherapies

[0837] As shown herein, and also evidenced in light of the knowledge in the art, TLRs inhibit or prevent induction of type I IFN. The immunostimulatory bacteria provided herein, include modifications the reduce or inhibit or eliminate TLR2/4/5 responses/activities, thereby overcoming the inhibition of type I IFN. The immunostimulatory bacteria provided herein, also include properties and/or payloads that enhance type I IFN expression or render type I IFN induction constitutive.

[0838] In contrast, many classes of immunotherapies have significant limitations that limit their safety and efficacy, as well as complicated platforms that are not likely to be widely used. Bacteria, particularly those provided herein, have numerous advantageous properties for use as anti-cancer therapeutics, compared to, for example, oncolytic viruses. These include the ease with which they can be propagated, manufactured, stored, and eliminated from a host when treatment is completed. Viruses, however, also have advantageous properties, including the host response. The response to a bacterial infection is an innate inflammatory response, which is not advantageous for an anti-cancer therapeutic. The response to a viral infection is similar to an anti-cancer response. This is summarized in the following table.

| | Bacteria | Viruses |
|---|---|---|
| Innate Recognition | TLR2, TLR4 and TLR5 | TLR3, TLR7/8, RIG-I |
| by: | | and STING |
| Inflammatory | Promote innate | Promote innate immunity; |
| Cytokine Profile: | immunity; Suppress | Promote adaptive |
| | adaptive immunity | immunity |
| Chemokine | Attract neutrophils to | Attract T-cells, monocytes |
| Gradients: | clear infection | to clear infection |
| Generation of | No | Yes |
| Immunity: | | |
| Immunogenicity: | Not immunogenic | Highly immunogenic |

[0839] A limitation of prior bacteria as a microbial anti-cancer platform, thus, derives from the specific immune program that is initiated upon sensing of bacteria, even intracellular bacteria, by the immune system, compared to viral-sensing pathways, which are more akin to anti-cancer pathways. The sensing programs that recognize viruses permit the generation of highly effective vaccines and durable adaptive immunity. Vaccinating against bacteria, however, has been met with limited success. For example, the FDA-approved vaccine for typhoid fever against Salmonella typhi is only 55% effective (see, e.g., Hart et al. (2016) PLoS ONE 11(1):e0145945), despite S. typhi containing a highly immunogenic Vi capsule and 0:9 antigen, which do not occur in less immunogenic bacterial strains, such as L. monocytogenes and S. typhimurium, against which there are no vaccines.

[0840] Bacteria and viruses contain conserved structures known as Pathogen-Associated Molecular Patterns (PAMPs), which are sensed by host cell Pattern Recognition Receptors (PRRs). Recognition of PAMPs by PRRs triggers downstream signaling cascades that result in the induction of cytokines and chemokines, and initiation of a specific immune response (see, e.g., Iwasaki and Medzhitov (2010) Science 327(5963):291-295). The manner in which the innate immune system is engaged by PAMPs, and from what type of infectious agent, determines whether an appropriate innate or adaptive response is generated to combat the invading pathogen.

[0841] A class of PRRs, known as Toll Like Receptors (TLRs), recognize PAMPs derived from bacterial and viral origins, and are located in various compartments within the cell. TLRs recognize a variety of ligands, including lipopolysaccharide (TLR4), lipoproteins (TLR2), flagellin (TLR5), unmethylated CpG motifs in DNA (TLR9), double-stranded RNA (TLR3), and single-stranded RNA (TLR7 and TLR8) (see, e.g., Akira et al. (2001) Nat. Immunol. 2(8):675-680; and Kawai and Akira (2005) Curr. Opin. Immunol. 17(4):338-344). DNA and RNA-based viruses can be sensed either in host cytosolic compartments after phagocytosis, or directly in the cytosol. Type I interferons (IFN-α, IFN-β) are the signature cytokines induced by host recognition of single-stranded and double-stranded DNA and RNA, either of viral origin, or from the uptake of damaged host cell DNA. For example, the synthetic dsRNA analog polyinosinic:polycytidylic acid (poly(I:C)) is an agonist for endosomal TLR3; the more stable version, poly ICLC (such as that sold under the trademark Hiltonol®), of a dsRNA, has been in clinical development (see, e.g., Caskey et al. (2011) J. Exp. Med. 208(12):2357-2366). Similarly, single-stranded RNA (ssRNA) in the endosome is sensed by TLR7 and TLR8 (only in humans), and its known synthetic ligands, resiquimod and imiquimod, are FDA-approved topical cancer immunotherapies.

[0842] In the cytosol, double-stranded RNA (dsRNA) is sensed by RNA helicases such as retinoic acid-inducible gene I (RIG-I) and melanoma differentiation-associated gene 5 (MDA-5), leading to induction of type I IFN (see, e.g., Ireton and Gale (2011) Viruses 3(6):906-919). The cytosolic sensor for dsDNA is mediated through Stimulator of Interferon Genes (STING), an ER-resident adaptor protein that is the central mediator for sensing cytosolic dsDNA from infectious pathogens or aberrant host cell damage (see, e.g., Barber (2011) Immunol. Rev. 243(1):99-108). STING signaling activates the TANK binding kinase 1 (TBK1)/interferon regulatory factor 3 (IRF3) axis, and the NF-κB signaling axis, resulting in the induction of IFN-β and other pro-inflammatory cytokines and chemokines that strongly activate innate and adaptive immunity (see, e.g., Burdette et al. (2011) Nature 478(7370):515-518). Sensing of cytosolic dsDNA through STING requires cyclic GMP-AMP synthase (cGAS), a host cell nucleotidyl transferase that directly binds dsDNA, and in response, synthesizes a cyclic dinucleotide (CDN) second messenger, cyclic GMP-AMP (cGAMP), which binds and activates STING (see, e.g., Sun et al. (2013) Science 339(6121):786-791; and Wu et al. (2013) Science 339(6121):826-830).

[0843] STING also can bind to bacterially-derived CDNs, such as c-di-AMP produced from intracellular L. monocytogenes, or c-di-GMP from S. typhimurium. Cyclic GMP-AMP synthase (cGAS) produces a non-canonical CDN that can activate human STING alleles that are non-responsive to bacterially-derived canonical CDNs. Unlike the CDNs produced by bacteria, in which the two purine nucleosides are joined by a phosphate bridge with 3′-3′ linkages, the internucleotide phosphate bridge in the cGAMP synthesized by cGAS is joined by a non-canonical 2′-3′ linkage. These 2′-3′ molecules bind STING with 300-fold better affinity than bacterial 3′-3′ c-di-GMP, and thus, are more potent physiological ligands of STING (see, e.g., Civril et al. (2013) Nature 498(7454):332-337; Diner et al. (2013) Cell Rep. 3(5):1355-1361; Gao et al. (2013) Sci. Signal 6(269):pl1; and Ablasser et al. (2013) Nature 503(7477):530-534). The cGAS/STING signaling pathway in humans appears to have evolved to preferentially respond to viral pathogens over bacterial pathogens.

[0844] Thus, viral-sensing PRRs and TLRs, such as STING and RIG-I, induce type I IFN, and the cytokines and chemokines that lead to effective T-cell mediated adaptive immunity. In the tumor setting, type I IFN signaling is required to induce T-cell trafficking chemokines, such as CXCL10, and also to activate DC cross-presentation of tumor antigens to prime CD8⁺ T-cells (see, e.g., Diamond et al. (2011) J. Exp. Med. 208(10):1989-2003; and Fuertes et al. (2011) J. Exp. Med. 208(10):2005-2016).

[0845] In contrast, host surveillance of bacteria, such as S. typhimurium, is largely mediated through TLR2, TLR4, and TLR5 (see, e.g., Arpaia et al. (2011) Cell 144(5):675-688). These TLRs signal through MyD88 (myeloid differentiation primary response protein 88) and TRIF (Toll/interleukin-1 receptor (TIR)-domain-containing adapter-inducing interferon-β) adaptor molecules to mediate induction of the NF-κB-dependent pro-inflammatory cytokines TNF-α and IL-6 (see, e.g., Pandey et al. (2015) Cold Spring Harb. Perspect. Biol. 7(1):a016246). S. typhimurium was shown to activate the NLRP3 inflammasome pathway, resulting in the cleavage of caspase-1 and the induction of the pro-inflammatory cytokines IL-1β and IL-18 that lead to pyroptotic cell death. Engagement of TLR2, TLR4 and TLR5, and inflammasome activation, induces chemokines and cytokines that lead to bacterial clearance by neutrophils and macrophages. Evidence that S. typhimurium is cleared by T-cells is limited, and antibodies that are generated against it are non-neutralizing (see, e.g., McSorley (2014) Immunol. Rev. 260(1):168-182). Further, S. typhimurium has mechanisms to directly suppress T-cell function, impairing any potential anti-tumor T-cell response from being generated (see, e.g., Kullas et al. (2012) Cell Host Microbe 12(6)791-798). As a result, bacterial cancer therapies, such as S. typhimurium, lead to recruitment and clearance by neutrophils and macrophages, which are not the T-cells that are required to generate adaptive anti-tumor immunity. It is described and shown herein that these differences can explain why prior bacterial anti-cancer vaccines, even those harboring host tumor antigens, are poor T-cell priming vectors in humans. Many of the TLRs have been reported to induce type I interferon (IFN), but is found and described herein that this dogma is not necessarily correct with respect to TLR2/3/4/5/7 in primary human monocyte-derived macrophages. Experiments were performed using TLR agonists to assess the effects on type I IFN. The results showed that TLR3 and TLR4 agonists do not induce type I IFN in primary human monocytes unless pretreated with IFNα. Agonizing TLR2 does not induce type I IFN even with pretreatment with IFNα. In fact, TLR2 can inhibit induction of type I IFN. This is a heretofore unidentified problem with bacterial-based therapeutics.

[0846] These problems are among those addressed by the immunostimulatory bacteria provided herein. The immunostimulatory bacteria provided herein are engineered to have advantageous properties that were previously only provided by viral therapeutics, and also, to retain the advantageous properties of bacterial therapeutics. The immunostimulatory bacteria provided herein can be systemically administered, can localize to tumors, tumor-resident immune cells, and/or the tumor microenvironment, overcome immunosuppression, and properly activate anti-tumor immunity, while also limiting the autoimmune-related toxicities of existing systemic immunotherapies. The bacteria provided herein effectively localize to tumor-resident immune cells, and encode therapeutic anti-cancer products, and can encode a plurality of such products. For example, the bacteria provided herein can encode complementary therapeutic products. The immunostimulatory bacteria provided herein are modified to reduce or eliminate activation of TLR2, 4 and 5. As a result, they do not inhibit the induction of type I IFN. Such immunostimulatory bacteria provided herein encode payloads that induce type I IFN. This finding is generalized such that vaccines and delivery vehicles that are provided herein are designed so that TLR2 response is eliminated or reduced so that it does not prevent or inhibit type I IFN. In some embodiments, TLR4 and 5 responses are reduced or eliminated, thereby providing vaccines and other immune-stimulating therapeutics that do not inhibit type I IFN.

[0847] Provided herein is a superior microbial anti-cancer, vaccine, RNA delivery platform, engineered to retain the beneficial properties of bacteria, while eliciting a viral-like immune response that induces effective adaptive immunity. As described herein, bacteria, such as strains of Salmonella and other species, can be modified as described herein to have reduced inflammatory effects, and thus, to be less toxic. As a result, for example, higher dosages can be administered. Any of these strains of Salmonella, as well as other species of bacteria, known to those of skill in the art and/or listed above and herein, can be modified as described herein.

[0848] The immunostimulatory bacteria provided herein are modified to have increased colonization of the tumor microenvironment, tumor-resident immune cells, and tumors. They are engineered so that they have reduced toxicity, and other properties that target them to the tumor microenvironment, including adenosine auxotrophy. The strains provided herein also are engineered so that they are not inactivated by complement. These characteristics, particularly those that result in colonization/infection of phagocytic cells also render the bacteria useful as vaccine platforms and as RNA delivery vehicles. They can be adapted for each use by virtue of the payloads selected, the regulatory sequences employed, depending upon whether bacterial or host cell transcriptional/translational machinery is to be used for expression of encoded products, and the locus of the host cells or tissues in which the products are produced.

[0849] The bacterial strains provided herein are engineered to deliver therapeutic products. The bacterial strains herein deliver immunostimulatory proteins, including cytokines, chemokines and co-stimulatory molecules, as well as modified gain-of-function cytosolic DNA/RNA sensors that can constitutively evoke or induce type I IFN expression, and other therapeutic products, such as, but not limited to, antibodies and fragments thereof, TGF-β and IL-6 binding decoy receptors, TGF-β polypeptide antagonists, bispecific T-cell engagers (BiTEs®), RNAi, and complementary combinations thereof, that promote an anti-tumor immune response in the tumor microenvironment. The bacterial strains also include genomic modifications that reduce pyroptosis of phagocytic cells, thereby providing for a more robust immune response, and/or reduce or eliminate the ability to infect/invade epithelial cells, but retain the ability to infect/invade phagocytic cells, so that they accumulate more effectively in tumors, the tumor microenvironment and in tumor-resident immune cells. The bacterial strains also can be modified to be resistant to inactivation by complement factors in human serum. The bacterial strains also can be modified to encode therapeutic products, including, alone or in combinations, for example, cytokines, chemokines, co-stimulatory molecules, constitutively active inducers of type I IFN, and monoclonal antibodies (and fragments thereof) to immune checkpoints, and also to other such targets.

[0850] Provided is an anti-cancer therapeutic product that delivers a genetic payload encoding a truncated co-stimulatory molecule (receptor or ligand; e.g., 4-1BBL, CD80, CD86, CD27L, B7RP1, OX40L), with a full or partial cytoplasmic domain deletion, for expression on an antigen-presenting cell (APC), where the truncated gene product is capable of constitutive immuno-stimulatory signaling to a T-cell through co-stimulatory receptor engagement, and is unable to counter-regulatory signal to the APC due to a deleted or truncated cytoplasmic domain.

[0851] The bacteria also can encode antigens, such as tumor antigens, and pathogen antigens or proteins, in additional to (or in lieu of) the immunostimulatory protein(s), such as STING and cytokines.

### 4. Therapeutics That Induce a Hybrid M1/M2 Anti-tumor Phenotype in Tumor-Resident Macrophages

[0852] Therapeutics described herein, such as immunostimulatory bacteria provided herein, upon administration, result in macrophages that have an anti-cancer phenotype that is a hybrid M1/M2 phenotype, described below, and also depicted in the Figures. Therapeutics provided and described herein produce a new anti-tumor macrophage phenotype. This phenotype results from infection of tumor-resident macrophage with anti-cancer therapeutics that deliver a payload comprising a combination of immunostimulatory proteins, such as, a cytokine, such as an IL-15 and a modified STING (referred to as eSTING herein, exemplary modified are detailed herein, see above and below for detailed descriptions), that constitutively induces type I IFN, and optionally has lower NF-κB signaling activity compared to unmodified human STING (the sequences of allelic STING proteins of human STING set forth in SEQ ID NOs: 305-309). The encoding nucleic acid is delivered in a therapeutic that has reduced or eliminated TLR2 or TLR2/4/5 inducing activity or response, whereby the expression of type I IFN is not inhibited, and is constitutive. The encoded cytokine is one that induces an anti-viral or anti-tumor response. The therapeutic can infect proliferating macrophage, generally, as shown herein M2 macrophages, which can express the encoded payload. The nucleic acid encoded by the delivery vehicle generally is non-integrating, such as in a non-integrating plasmid. Exemplary of the therapeutics are immunostimulatory bacteria provided herein, such as the Salmonella tryphimuium strain, designated as STACT, that encodes a payload comprising a cytokine and type I IFN-inducing protein, such as the combination IL-15/IL-15R alpha chain complex+eSTING. The STACT additionally can encode a tumor antigen, and/or other payloads, including any described herein, suitable for a particular treatment. Thus, provided are therapeutics, such a nanoparticles, viruses, exosomes, bacteria, and other delivery vehicles, that, upon administration, such as systemic or intratumoral administration, can be taken up by tumor-resident macrophages, and that encode a combination payload, whereby the resulting macrophages have a hybrid M1/M2 phenotype, as detailed and exemplified herein.

[0853] Also provided are methods for screening for such therapeutics by assaying in macrophages and detecting the M1/M2 phenotype. Also provided are combination therapies. It also is shown herein, that pre-treatment of a subject with cancer with an apoptosis-inducing chemotherapy, prior to administration of any of the immunostimulatory bacteria provided herein, leads to an improved therapeutic response to the immunostimulatory bacteria. The following discussion describes the results herein, including the requisite hybrid M1/M2 macrophage phenotype that are exemplified herein. As detailed herein and exemplified in the examples, therapeutics can produce macrophage with an M1/M2 hybrid phenotype. The resulting macrophage can phagocytose apoptotic tumor cells, and can express the encoded immunostimulatory proteins that produce an anti-cancer response in the subject.

[0854] Macrophages are the most abundant myeloid cell across solid tumor types, including, but not limited to, lymphoma, nasopharyngeal, esophageal, thyroid, lung, breast, hepatocellular carcinoma, stomach, pancreatic, kidney, colorectal, ovarian and fallopian tube carcinoma, and myeloma. Macrophage limit T-cell infiltration into solid tumors and suppress their function, such as in triple negative breast cancer; these macrophages dominate the intratumoral immune population and promote T-cell exclusion in colorectal cancer. Macrophage are the predominant producers of type I IFN. It is shown herein, that immunostimulatory bacteria, provided herein, such as the exemplary strains designated STACT. STACT strains only target phagocytic tumor-resident myeloid cells after tumor-specific enrichment. STACT tumor specific infiltration and enrichment, is followed by consumption by tumor-associated macrophage and ectopic gene expression.

[0855] As known to those of skill in the art M1 tumor-associated macrophages have a variety of (TAMs). Conventional wisdom holds that M1 macrophages have anti-tumor activity. It is shown herein that this is not correct. The M2 macrophage, not M1, are phagocytic of apoptotic tumor cells. M1 macrophage in COVID and cancer are inflammatory and immunosuppressive because of the pro-inflammatory cytokines that are produced. M1 cytokines impair type I IFN and CD8+ T-cell priming in COVID and cancer. Therefore, conversion of M2 macrophage to M1 in tumors not desirable. It is shown herein that a phenotype that is a hybrid of M1 and M2 is a phenotype that should be produced for an anti-tumor response. Therapeutics described and provided herein result in the heretofore unknown, but advantageous, M1/M2 hybrid phenotype. Below is a table, also described in the Examples, that describes markers attributed to M1 and M2 phenotypes.

TABLE
Markers Attributed to M1 and M2 Macrophage Phenotypes

| | | | M1 or |
|---|---|---|---|
| Class | Target | Function | M2 |
| Co-stimulatory | CD80 | Co-stimulatory Signal | M1 |
| molecules | CD86 | Co-stimulatory Signal | M1 |
| Chemokine | CCR7 | Lymphocyte node (LN) homing of T-cells and DCs | M1 |
| signaling | CXCL10 | Recruit T-cells | M1 |
| | CXCL11 | Recruit T-cells | M1 |
| Pattern | CD14 | Microbial-targeting (LPS) | M1/M2 |
| recognition | CD206 | Microbial-targeting (mannose) | M2 |
| receptors | CD209 | Enhanced phagocytosis, microbial-targeting (high mannose), viral | M2 |
| | | pathogen clearance, cell trafficking, immune synapse formation, | |
| | | T-cell proliferation | |
| Scavenger | CD68 | Tumor-associated macrophages (TAMs) | M1/M2 |
| receptors | CD163 | Microbial targeting (gram-negative) | M2 |

[0856] As shown in the Examples, bactofection with an immunostimulatory bacterium provided herein that is genome modified so that it does not induce TR2/4/5 (or not induce sufficiently to block type I IFN production), encoding a payload of immunostimulatory proteins, alters the phenotype of the infected macrophage to a phenotype that herein is referred to as an M1/M2 hybrid phenotype. The following table describes markers associated with this phenotype.

TABLE
Markers Attributed to M1 and M2 Macrophage Phenotypes Post-Treatment

| | | | M1 or | |
|---|---|---|---|---|
| Class | Target | Function | M2 | Post-Treatment |
| Co- | CD80 | Co-stimulatory Signal | M1 | Upregulated |
| stimulatory | | | | |
| molecules | CD86 | Co-stimulatory Signal | M1 | Upregulated |
| Chemokine | CCR7 | Lymphocyte node (LN) homing of T-cells | M1 | Upregulated |
| signaling | | and DCs | | |
| | CXCL10 | Recruit T-cells | M1 | Upregulated |
| | CXCL11 | Recruit T-cells | M1 | Upregulated |
| Pattern | CD14 | Microbial-targeting (LPS) | M1/M2 | Upregulated |
| recognition | CD206 | Microbial-targeting (mannose) | M2 | Downregulated |
| receptors | | | | (upregulated relative |
| | | | | to M1) |
| | CD209 | Enhanced phagocytosis, microbial-targeting | M2 | Downregulated |
| | | (high mannose), viral pathogen clearance, | | (upregulated relative |
| | | cell trafficking, immune synapse formation, | | to M1) |
| | | T-cell proliferation | | |
| Scavenger | CD68 | Tumor-associated macrophages (TAMs) | M1/M2 | Upregulated |
| receptors | CD163 | Microbial targeting (gram-negative) | M2 | Upregulated |

[0857] It is shown herein that treatment, such as with immunostimulatory bacteria provided herein that are designed so that they infect tumor-resident macrophages, and to encode and express immunostimulatory proteins, such as a combination of a cytokine and a STING protein that is engineered to have constitutive activity, alter the phenotype of the infected macrophage to one that is such an M1/M2 hybrid. Macrophage with this phenotype have anti-tumor activity. Cell surface markers, that are upregulated relative to M1 macrophage (downregulated relative M2) are CD206 and retention of CD209; upregulated markers include CD80/CD86 co-stimulation and upregulation of M1 lymph node-homing (LN-homing) CCR7. There is an upregulation of all classically-associated M1 inflammatory macrophage markers, expression of pattern recognition receptors (PRRs), scavenging and phagocytic markers: C14, CD206, CD209, Cd68, and CD163, attributed to M2 macrophages. Hence the resulting phenotype is a hybrid of M1 and M2 macrophage phenotypes.

[0858] It also is shown herein that the immunostimulatory bacteria that infect the tumor-resident macrophage infect M2 macrophage, not M1, and that the encoded payload of immunostimulatory proteins, which expression results in the hybrid phenotype, only can be expressed if the macrophage are proliferating. It is shown herein that it is necessary for the macrophage be proliferating for the encoded nucleic acid to get into the nucleus of the cell for transcription. The nucleic acid should be non-integrating. Thus, the process, as shown in the Examples, following administration results in infection of proliferating M2 macrophage, which then exhibit the hybrid M1/M2 phenotype, which as shown herein is an anti-cancer phenotype.

[0859] Any therapeutic that can infect proliferating M2 macrophage, and deliver immunostimulatory proteins, such as IL-15/IL-15R alpha chain complex and eSTING (particularly constitutive STING, such as any described herein), and other similar combinations of immunostimulatory proteins, where they are expressed by the macrophage, result in this advantageous, heretofore unreported, phenotype. As shown and described herein, administration of a therapeutic, such as the strain designated STACT with a payload immunostimulatory protein, including one that induces type I IFN, provides for macrophage phagocytosis of apoptotic tumor cells. Results of studies show that exemplary strain STACT, IL-15/IL-15R alpha chain complex—eSTING, maintains M2-like properties of apoptotic tumor cell phagocytosis. Unlike small molecule STING agonists that polarize M2 to an M1 phenotype, the M2 macrophage treated with therapeutics, such as these immunostimulatory bacteria provided herein, retain phagocytic functions.

[0860] Type I IFN, which is encoded by the therapeutics provided herein, such as the STACT that encodes the modified STING, enhances macrophage phagocytosis through induction if interferon stimulated gene 15 (ISG15). The results show that STACT IL-15/IL-15R alpha chain complex+eSTING induction of type I IFN enhances phagocytosis of apoptotic tumor cells. Results, detailed in the Examples, show that human M2 are more phagocytic than M1 for bacteria, and bacterial phagocytosis by the macrophage is enhanced for the immunostimulatory bacteria that encode the IL-15/IL-15R alpha chain complex+eSTING. Phagocytosis of these bacteria by M2 macrophages induces the hybrid M1/M2 phenotype. Thus, it also can prime apoptotic tumor antigens (and also encode the antigens).

[0861] It is shown herein that transgene expression only occurs in proliferating cells. Factors associated with M2 polarization induce macrophage proliferation, while M1-associated factors do not. M1-polarizing signals and adenine and hypoxia can prevent cell cycle entry, which can results in impaired plasmid entry. The immunostimulatory bacteria provided herein are adenosine auxotrophs; they can deplete adenosine in the tumor microenvironment. It is shown in animal models, and described herein, that while there are detectable CFUs of the bacteria, there is no expression of plasmid payloads in spleen and liver. In contrast as shown in the Examples, M2 macrophages, not liver Kupffer or human vascular endothelial (HUVECs) cells, demonstrate payload delivery. It shown herein, that M2 macrophages, not Kupffer or HUVECs are phagocytic and proliferating, providing for payload delivery, which when the proper combination of immunostimulatory proteins, such as a cytokine, such a IL-15, such as IL-15/IL-15R alpha chain complex, and a protein that constitutively induces type I IFN, such as the eSTING proteins provided herein is encoded and expressed, it leads to the desirable and advantageous anti-tumor M1/M2 hybrid phenotype. Macrophage proliferation can be assessed to monitor treatment and/or to select subjects for treatment. It is shown herein that STMN1 (stathmin 1—microtubule destabilizer) is highly correlated with G2/M proliferation gene signature. It can be used as marker for proliferation M2 macrophages. Factors associated with M2 polarization induce macrophage proliferation, while M1-associated factors do not. Therapeutics, such as the immunostimulatory bacteria provided herein that encode the combination of immunostimulatory proteins prime and activate tumor-associate antigen-specific CD8+ cells, and induce anti-tumor immunity.

[0862] FIG. 16 depicts the priming and activation of tumor-associate antigen (TAA)-specific CD8⁺ T-cells and induction of anti-tumor immunity, such as by the immunostimulatory bacterium, designated as STACT, that encode immunostimulatory proteins, such as a cytokine and a protein that constitutively induces type I IFN, such as an eSTING. The resulting macrophages can phagocytose apoptotic tumor cells, and recruit and present tumor neo-antigens to CD8+ cells under co-stimulation and cytokine activation. The next figure depicts that M2/M2 antigens and properties of the resulting macrophage. As shown in the figures and demonstrated in the Examples, the resulting macrophage have M1 markers properties, such as CD80/86, CCR7, IFNγ, IFNβ, CXCL10/11, MHC I and II, and antigen Presenting, lymph-node (LN)-homing, and M2 markers and properties, such as CD14, CD163, CD206, and CD209, phagocytic of apoptotic tumor cells and also of bacteria, including the bacterial therapeutic. Hence, these therapeutics result in macrophage with a hybrid phenotype that provides anti-tumor immunity.

SPP1 v C1QC tumor-associated macrophages (TAMs)

[0863] C1q Complement Factor has phagocytic wound healing and anti-tumor functions. C1q belongs to the classical complement pathway bridging innate and adaptive immunity. C1q promotes macrophage phagocytosis of apoptotic cells through induction of MERTK phagocytic receptor. MERTK encodes the phagocytosis receptor required for macrophage phagocytosis of apoptotic C1QC+ TAMs in CRC have high CD80 co-stim and CXCL10 expression, and engage T-cells. C1QC^{hi}SPP1^{low} TAMs are associated with the best overall survival (OS) in CRC.

[0864] C1QC (complement protein) promotes macrophage phagocytosis of apoptotic cells through induction of MERTK, and also is a marker of T-cell priming and migratory macrophages. SPP1 encodes Osteopontin, which promotes macrophage attachment and opsonization though the αₓβ₂ integrin receptors. SPP1+ macrophage are the most wound-healing macrophages. Thus there are two distinct tumor-associated macrophage (TAM) subsets: complement-activating C1QC′ TAMs and wound-healing SPP1′ TAMs. Macrophages have large variations in functional markers across a range of solid tumor types. C1QC and SPP1 subsets predominate in many tumor types. Single-cell RNA-seq analysis performed on immune and stromal populations in human and murine colorectal cancer revealed the following: two distinct TAM subsets: complement-activating C1QC′ TAMs, and wound-healing SPP1′ TAMs. C1QC^{low}SPP1^{hi} TAMs are associated with lowest overall survival (OS) and most resistance to immunotherapy CSF1R antagonists do not deplete SPP1+ macrophages, only C1QC+, and explaining why therapy failed in the clinic.

[0865] Osteopontin (OPN) recruits monocytes and opsonizes bacteria to enhance bacterial phagocytosis; it mediates processes for cancer progression. OPN stimulates monocyte recruitment; it binds to monocytes and bacteria and enhances phagocytosis via opsonization. Monocyte recruitment and opsonization occur through the αₓβ₂ integrin receptor. SPP1⁺ TAMS are highly phagocytic and promote a wound-healing tumor microenvironment. SPP1 is broadly upregulated in tumor tissue compared to healthy tissue, particularly lung, breast, head and neck, gastric and colon cancers. For example the highest myeloid/T-cell tumor subtypes in CRC (colorectal cancer) have the highest SPP1+ macrophages and poorest survival. The highest ratio SPP1/CD68 macrophages have the poorest survival. SPP1 associated with poor survival across many tumor types.

[0866] C1QC is not broadly upregulated in tumor vs. healthy tissue, but is upregulated in kidney cancers (KIRC and KICH) where SPP1 is not upregulated. Other cancers, such as lung, liver, and color have much loser C1QC in tumor tissue than in healthy tissue. C1QC is much less associated with poor survival than is SPP1. Primary human MDMs (monocyte derived macrophages) are C1QC+. Treatment therapeutics described herein, such as he immunostimulatory bacteria provided herein, such as those that encode a cytokine+a protein that induces type I IFN, such as IL-15/IL-15R alpha chain complex+eSTING, induces a hybrid SPP1+/C1QC+ phenotype. As shown in the Examples, these immunostimulatory bacteria induce a phenotype in which SPP1, C1QC, and MERTK are markers. Their expression (relative to reference protein actin) is correlated with tumor Status. A higher ratio of C1QC to SPP1 is correlated with payload delivery and CD8+ T-cell infiltration. For example, STACT is very efficacious in breast and colon tumor models, for example, that are C1QC^{hi}/SPP1^{low}. Experiments described in the Examples, show that suppression of SPP1 and induction of C1QC ae correlates of strain potency. For example, proliferative macrophages in breast cancer are MK167+C1QC+STMN1+(stathmin 1); proliferating macrophage in human CRC are C1QC+STMN1+. Other experiments show that proliferating macrophages across solid tumor types are identifiable solely by their SPP1 C1QC status.

### Proliferating Macrophages and Apoptosis

[0867] It is shown herein that nucleic acid in therapeutics that infect or enter into tumor-resident macrophages are not produced unless the macrophage are proliferating. Hence, provided herein are methods for identifying tumors that comprise proliferating macrophages for treatment with the therapeutics provided herein that result in the M1/M2 phenotype.

[0868] The Examples show that proliferating macrophage in solid tumors can be identified by their G2M cell cycle pathway score (generally ≥14 indicates proliferation) and by STMN1V. Experiments and results in the Examples also show that macrophages increase with chemotherapy. For example, in breast cancers CD68 was significantly higher after two rounds of chemotherapy. Proliferating macrophages are highest in lung colon and breast cancer. It is shown herein that gene delivery therapy requires proliferating macrophage for payload expression. A regiment for treatment with any of the immunostimulatory bacteria provided herein, can be preceded by chemotherapy.

[0869] The amount of proliferating macrophages in tumors prior to dosing with the therapeutics herein can be achieved with pre-treatment with anti-PD-1. The role that PD-1 and PD-L1 play on myeloid cell biology has been underappreciated relative to their roles in T-cell—tumor cell interactions.

[0870] The Examples also show that combination therapy regiments can be advantageous; the data show that prior treatment with chemotherapy can enhance the therapeutic effect of immunostimulatory bacteria provided here by increasing the number of proliferating macrophages in the tumors. The ability to enhance plasmid payload delivery in tumors also can be achieved through induction of apoptosis, which recruits phagocytic and proliferating macrophages that are required for DNA transfer to tumor-resident macrophages. Several types of chemotherapy have been described to promote tumor apoptosis, including docetaxel (DTX), paclitaxel (PTX), doxorubicin (DOX), 5-fluorouracil (5-FU), carboplatin (CARB), and cyclophosphamide (CTX) (Anfray et al. (2019) Cells 9(1):46).

[0871] Immunostimulatory bacteria provided herein include adenosine auxotrophs, such as the purI⁻ strains, including the strains designated STACT. These bacteria can replicate in solid tumors because there are high levels of purine and/or adenosine. The tumor microenvironment is immunologically dysregulated permitting enrichment of immunosuppressive phagocytic cells (dendritic cells (DCs), tumor-associated macrophages (TAMs), and neutrophils/MDSCs. The tumor core generates purines and purine derivatives. Tumor cell apoptosis generates phagocyte-recruiting ATP; high metabolic turnover generates extracellular purines. Hypoxia leads to CD39/CD73+TNAP (tissue-nonspecific alkaline phosphatase) generates extracellular adenosine. High adenosine inhibits phagocytosis by PBMC-derived macrophage phagocytosis. The presence of tumor-specific high concentrations of adenosine (generally ≥10 μM) can inhibit monocyte-derived tumor-associated macrophage (TAM) recruitment and phagocytosis of the immunostimulatory bacteria and apoptotic tumor cells; the immunostimulatory bacteria provided herein are adenosine auxotrophs so they deplete the adenosine and can replicate in this environment.

### Immune Desert Tumors

[0872] The immunostimulatory bacteria provided herein can convert or change “cold tumors” into T-cell infiltrated tumors. Tumors are classified into one of three basic immunophenotypes: immune-inflamed, immune-excluded and immune-desert phenotype (Yuan-Tong et al. (2021) Theranostics 11:5365-5386; Chen et al. (2017) Nature 541:321-3). Immune-inflamed tumors, also referred to as “hot tumors,” are characterized by high T-cell infiltration, increased interferon-γ (IFN-γ) signaling, expression of PD-L1, and high tumor mutational burden (TMB). Immune-excluded tumors and immune-desert tumors are “cold tumors.” In immune-excluded tumors, CD8+T lymphocytes localize only at invasion margins and do not efficiently infiltrate the tumor; in immune-desert tumors, CD8+T lymphocytes are absent from the tumor and its periphery (Yuan-Tong et al. (2021) Theranostics 11:5365-5386). “Cold tumors” also are characterized by low mutational load, low major histocompatibility complex (MHC) class I expression and low PD-L1 expression (Hegde et al. (2016) Clin. Cancer Res. 22:1865-1874). Immunosuppressive cell populations, including tumor-associated macrophages (TAMs) and T-regulatory cells (Tregs) and myeloid-derived suppressor cells (MDSCs), also are present in cold tumors.

[0873] Tumor cell death and antigen release, antigen-presenting cell (APC) processing and presentation of tumor antigens, and APC and T-cell interactions lead to T-cell priming and activation (Yuan-Tong et al. (2021) Theranostics 11:5365-5386). Production of T cells and their physical contact with tumor cells is necessary for the success of antitumor immunity. Once infiltrating the tumor bed, cytotoxic T lymphocytes (CTLs) recognize antigenic peptide-MHC complexes on the surface of tumor cells, form immune synapses, and release perforin and granzyme to destroy the tumor cells. CTLs contribute to the apoptosis of tumor cells through the Fas/FasL pathway and suppress tumors by inducing ferroptosis and pyroptosis. Dead tumor cells release additional tumor antigens and thereby amplify the T-cell response (see, Yuan-Tong et al. (2021) Theranostics 11:5365-5386, and references cited therein).

[0874] Immune-excluded tumors and immune-desert tumors are “cold tumors.” In immune-excluded tumors, CD8+T lymphocytes localize only at invasion margins and do not efficiently infiltrate the tumor; in immune-desert tumors, CD8+T lymphocytes are absent from the tumor and its periphery (Yuan-Tong et al. (2021) Theranostics 11:5365-5386). “Cold tumors” also are characterized by low mutational load, low major histocompatibility complex (MHC) class I expression and low PD-L1 expression (Hegde et al. (2016) Clin. Cancer Res. 22:1865-1874). Immunosuppressive cell populations, including tumor-associated macrophages (TAMs) and T-regulatory cells (Tregs) and myeloid-derived suppressor cells (MDSCs), are also present in cold tumors.

[0875] It is shown herein that treatment with therapeutics provided and described herein that result in convert the phenotype of tumor-resident macrophages into a hybrid M1/M2 phenotype, which exhibits increased phagocytosis of apoptotic cells and bacteria, can convert cold tumors into hot tumors to thereby render the tumors susceptible to treatment with immunotherapy, including checkpoint inhibitors.

[0876] In summary, among the findings described and exemplified herein, it is shown and described herein that M1 macrophages are not phagocytic of apoptotic cells; M2 macrophages are. M1 macrophages are highly inflammatory, do not produce type I IFN, and suppress CD8+ T-cell mediated adaptive immunity in humans. Infection, such as bactofection with immunostimulatory bacteria, of primary human M2 macrophages with immunostimulatory bacteria provided herein, as exemplified by the strain designated STACT IL-15plex+eSTING, induces a hybrid M1/M2 phenotype that retains M2 phagocytic capacity, upregulates M1-like costimulatory receptors (CD80/86) and lymph node chemotaxis receptors (CCR7), and produces type I IFN-mediated cytokines and chemokines. The induction of type I IFN by the encoded payloads, such as IL-15plex (IL-15/IL-15R alpha chain complex)+eSTING, such as the constitutive STING proteins, in M2 macrophages enhances phagocytosis.

[0877] Human primary M2 macrophages, not M1 macrophages, provide for plasmid transfer and gene expression following bactofection of with a strain, such as STACT IL-15plex+eSTING. THP1 monocytes can be differentiated to macrophages using PMA, but THP1-derived macrophages do not provide for plasmid transfer. Despite the presence of CFU in the spleen and liver following administration, and an abundance of phagocytic splenic macrophages and liver Kupffer cells, no payload expression was observed in these tissues. It is shown herein that plasmid transfer and gene expression requires proliferating cells. M2 macrophages, unlike M1, splenic or liver Kupffer macrophages, are proliferating and therefore can provide for plasmid transfer following bactofection. Treatment of THP1 cells with PMA suppresses cell cycle genes, induces Maf-B and Maf cell cycle suppressing transcription factors, and prohibits plasmid transfer. Addition of M-CSF and co-culture with apoptotic cells enhances proliferation and plasmid transfer, while M1-differentiating reagents and the M2 reagents IL-4 and IL-10 impair proliferation and plasmid transfer. The ability of STACT IL-15plex+eSTING to deliver plasmid payloads in murine tumors is correlated to the amount of proliferating macrophages. Induction of type I IFN by STACT IL-15plex+eSTING enhances tumor macrophage proliferation (MMTV), and CD8 T-cell infiltration/expansion is correlated to #proliferating macrophages.

[0878] Proliferating macrophages in human solid tumors can be identified by IHC staining of CD68+PCNA or Ki67, and qPCR for the G2M score and stathmin1 expression.

### C. Modifications and Enhancements of Immunostimulatory Bacteria to Increase Therapeutic Index and to Increase Accumulation in Tumor-Resident Myeloid Cells

[0879] Provided herein are enhancements, including modifications to the bacterial genome, or to the immunostimulatory bacteria, that, for example, reduce toxicity and improve the anti-tumor activity, such as by increasing accumulation in tumor-resident myeloid cells, improving resistance to complement inactivation, reducing immune cell death, promoting adaptive immunity, and enhancing T-cell function. The modifications are described and exemplified with respect to Salmonella, particularly S. typhimurium; it is understood that the skilled person can effect similar enhancements/modifications in other bacterial species, such as Listeria, and Escherichia, and in other Salmonella strains to achieve similar properties and/or effects, and to express the same encoded payloads. Exemplary of such enhancements/modifications are the following:

### 1. Deletions in Genes in the LPS Biosynthetic Pathway

[0880] The lipopolysaccharide (LPS) of Gram-negative bacteria is the major component of the outer leaflet of the bacterial membrane. It is composed of three major parts, lipid A, a non-repeating core oligosaccharide, and the O-antigen (or O polysaccharide). O-antigen is the outermost portion on LPS and serves as a protective layer against bacterial permeability, however, the sugar composition of O-antigen varies widely between strains. The lipid A and core oligosaccharide vary less, and are more typically conserved within strains of the same species. Lipid A is the portion of LPS that contains endotoxin activity. It is typically a disaccharide decorated with multiple fatty acids. These hydrophobic fatty acid chains anchor the LPS into the bacterial membrane, and the rest of the LPS projects from the cell surface. The lipid A domain is responsible for much of the toxicity of Gram-negative bacteria. Typically, LPS in the blood is recognized as a significant pathogen associated molecular pattern (PAMP), and induces a profound pro-inflammatory response. LPS is the ligand for a membrane-bound receptor complex comprising CD14, MD2, and TLR4. TLR4 is a transmembrane protein that can signal through the MyD88 and TRIF pathways to stimulate the NF-κB pathway and result in the production of pro-inflammatory cytokines, such as TNF-α and IL-6, the result of which can be endotoxic shock, which can be fatal. LPS in the cytosol of mammalian cells can bind directly to the caspase recruitment domains (CARDs) of caspases 4, 5, and 11, leading to autoactivation and pyroptotic cell death (see, e.g., Hagar et al. (2015) Cell Research 25:149-150). The composition of lipid A and the toxigenicity of lipid A variants is well documented. For example, a monophosphorylated lipid A is much less inflammatory than lipid A with multiple phosphate groups. The number and length of the acyl chains on lipid A also can have a profound impact on the degree of toxicity. Canonical lipid A from E. coli has six acyl chains, and this hexa-acylation is potently toxic. S. typhimurium lipid A is similar to that of E. coli; it is a glucosamine disaccharide that carries four primary and two secondary hydroxyacyl chains (see, e.g., Raetz et al. (2002) Annu. Rev. Biochem. 71:635-700).

a. msbB Deletion

[0881] The enzyme lipid A biosynthesis myristoyltransferase, encoded by the msbB gene in S. typhimurium, catalyzes the addition of a terminal myristoyl group to the lipid A domain of lipopolysaccharide (LPS) (see, e.g., Low et al. (1999) Nat. Biotechnol. 17(1):37-41). Deletion of msbB, thus, alters the acyl composition of the lipid A domain of LPS, the major component of the outer membranes of Gram-negative bacteria. For example, deletion of msbB in the S. typhimurium strain VNP20009 results in the production of a predominantly penta-acylated lipid A, which is less toxic than native hexa-acylated lipid A, and allows for systemic delivery without the induction of toxic shock (see, e.g., Lee et al. (2000) International Journal of Toxicology 19:19-25). This modification significantly reduces the ability of the LPS to induce septic shock, attenuating the bacterial strain, and thus, increasing the therapeutic index of Salmonella-based immunotherapeutics (see, e.g., U.S. Patent Publication Nos. 2003/0170276, 2003/0109026, 2004/0229338, 2005/0255088, and 2007/0298012). Importantly, msbB mutants that do not express the msbB product are unable to replicate intracellularly, as exemplified herein (see, e.g., Example 2), which is a requirement for Salmonella virulence (see, e.g., Leung et al. (1991) Proc. Natl. Acad. Sci. U.S.A. 88:11470-11474).

[0882] Other LPS mutations, including replacements, deletions, or insertions that alter LPS expression, can be introduced into the bacterial strains provided herein, including the Salmonella strains, that dramatically reduce virulence, and thereby provide for lower toxicity, and permit the administration of higher doses. As exemplified herein, the msbB⁻ locus can be partially deleted, or interrupted, or translocated. It also can be completely deleted, which can improve growth of the strain.

[0883] Corresponding genes, encoding homologs or orthologs of lipid A biosynthesis myristoyltransferase in other bacterial species, also can be deleted or disrupted to achieve similar results. These genes include, but are not limited to, for example, lpxM, encoding myristoyl-acyl carrier protein-dependent acyltransferase in E. coli; and msbB, encoding lipid A acyltransferase in S. typhi.

b. pagP Deletion or Inactivation

[0884] As described above, msbB mutants of S. typhimurium cannot undergo the terminal myristoylation of lipid A, and produce predominantly penta-acylated lipid A that is significantly less toxic than hexa-acylated lipid A. The modification of lipid A with palmitate is catalyzed by the enzyme lipid A palmitoyltransferase (PagP). Transcription of the pagP gene is under control of the PhoP/PhoQ system, which is activated by low concentrations of magnesium, e.g., inside the SCV. Thus, the acyl content of S. typhimurium lipid A is variable, and with wild-type bacteria, it can be hexa-acylated or penta-acylated. The ability of S. typhimurium to palmitate its lipid A increases resistance to antimicrobial peptides that are secreted into phagolysosomes.

[0885] In wild-type S. typhimurium, expression of pagP results in lipid A that is hepta-acylated. In an msbB mutant (in which the terminal acyl chain of the lipid A cannot be added), the induction of pagP results in a hexa-acylated lipid A (see, e.g., Kong et al. (2011) Infection and Immunity 79(12):5027-5038). Hexa-acylated lipid A has been shown to be the most pro-inflammatory. While groups have sought to exploit this pro-inflammatory signal, for example, by deletion or disruption of pagP to allow only hexa-acylated lipid A to be produced (see, e.g., Felgner et al. (2016) Gut Microbes 7(2):171-177; and Felgner et al. (2018) Oncoimmunology 7(2):e1382791), this can lead to poor tolerability, due to the TNF-α-mediated pro-inflammatory nature of the LPS, and paradoxically less adaptive immunity (see, e.g., Kocijancic et al. (2017) Oncotarget 8(30):49988-50001).

[0886] LPS is a potent TLR4 agonist that induces TNF-α and IL-6. The dose-limiting toxicities in the I.V. VNP20009 clinical trial (see, e.g., Toso et al. (2002) J. Clin. Oncol. 20(1):142-152) at 1E9 CFUs/m², were cytokine mediated (fever, hypotension), with TNF-α levels >100,000 pg/ml, and IL-6 levels >10,000 pg/ml in serum at 2 hours. Despite the msbB deletion in VNP20009 and its reduced pyrogenicity, the LPS still can be toxic at high doses, possibly due to the presence of hexa-acylated lipid A. Thus, a pagP⁻/msbB⁻ strain, which cannot produce hexa-acylated lipid A, and produces only penta-acylated lipid A, resulting in lower induction of pro-inflammatory cytokines, is better tolerated at higher doses, and will allow for dosing in humans at or above 1E9 CFUs/m². Higher dosing leads to increased colonization of tumors, tumor-resident immune cells, and the tumor microenvironment, enhancing the therapeutic efficacy of the immunostimulatory bacteria. Because of the resulting change in bacterial membranes and structure, the host immune response, such as complement activity, is altered so that the bacteria are not eliminated upon systemic administration. For example, it is shown herein that pagP⁻/msbB⁻ mutant strains have increased resistance to complement inactivation and enhanced stability in human serum.

[0887] Provided herein are immunostimulatory bacteria, exemplified by live attenuated Salmonella strains, such as the exemplary strain of S. typhimurium, that only can produce LPS with penta-acylated lipid A, that contain a deletion or disruption of the msbB gene, and that further are modified by deletion or disruption of pagP. As discussed above, deletion of msbB expression prevents the terminal myristoylation of lipid A, while deletion of pagP expression prevents palmitoylation. A strain modified to produce LPS penta-acylated lipid A results in lower levels of pro-inflammatory cytokines, improved stability in the blood, resistance to complement fixation, increased sensitivity to antimicrobial peptides, enhanced tolerability, and increased anti-tumor immunity when further modified to express heterologous genetic payloads that stimulate the immune response in the tumor microenvironment.

[0888] Corresponding genes, encoding homologs and orthologs of lipid A palmitoyltransferase (PagP) in other bacterial species, also can be deleted or disrupted to achieve similar results. These genes include, but are not limited to, for example, pagP, encoding Lipid IVA palmitoyltransferase in E. coli; and pagP, encoding antimicrobial peptide resistance and lipid A acylation protein in S. typhi.

### 2. Nutrient Auxotrophy

[0889] The immunostimulatory bacteria provided herein can be attenuated by rendering them auxotrophic for one or more essential nutrients, such as purines (for example, adenine), nucleosides (for example, adenosine), amino acids (for example, aromatic amino acids, arginine, and leucine), adenosine triphosphate (ATP), or other nutrients as known and described in the art.

a. purI Deletion/Disruption

[0890] Phosphoribosylaminoimidazole synthetase, an enzyme encoded by the purI gene (synonymous with the purM gene), is involved in the biosynthesis pathway of purines. Disruption or deletion or inactivation of the purI gene, thus, renders the bacteria auxotrophic for purines. In addition to being attenuated, purI⁻ mutants are enriched in the tumor environment and have significant anti-tumor activity (see, e.g., Pawelek et al. (1997) Cancer Research 57:4537-4544). It was previously described that this colonization results from the high concentration of purines present in the interstitial fluid of tumors as a result of their rapid cellular turnover. Since the purI⁻ bacteria are unable to synthesize purines, they require an external source of adenine, and it was thought that this would lead to their restricted growth in the purine-enriched tumor microenvironment (see, e.g., Rosenberg et al. (2002) J. Immunotherapy 25(3):218-225). While the VNP20009 strain was initially reported to contain a deletion of the purI gene (see, e.g., Low et al. (2003) Methods in Molecular Medicine Vol. 90, Suicide Gene Therapy: Methods and Reviews, pp. 47-59), subsequent analysis of the entire genome of VNP20009 demonstrated that the purI gene is not deleted, but is disrupted by a chromosomal inversion (see, e.g., Broadway et al. (2014) Journal of Biotechnology 192:177-178). The entire gene is contained within two parts of the VNP20009 chromosome that is flanked by insertion sequences, one of which has an active transposase. While disruption of the purI gene limits replication to the tumor tissue/microenvironment, it still permits intracellular replication and virulence. Deletion or disruption of each of the msbB and the purI genes, as exemplified herein (see, Example 2), is required to limit bacterial growth to the extracellular space in tumor tissue, and prevent intracellular replication. Provided herein are strains in which the coding portion of these genes are completely deleted to eliminate any possible reversion to wild-type by recombination. It is shown herein that such bacteria grow more effectively.

[0891] Besides purI gene deletions or disruptions, nutrient auxotrophy can be introduced into the immunostimulatory bacteria by deletions/mutations in genes such as aro, gua, thy, nad, and asd, for example. Nutrients produced by the biosynthesis pathways involving these genes are often unavailable in host cells, and as such, bacterial survival is challenging. For example, attenuation of Salmonella and other bacterial species can be achieved by deletion of the aroA gene, which is part of the shikimate pathway, connecting glycolysis to aromatic amino acid biosynthesis (see, e.g., Felgner et al. (2016) mBio 7(5):e01220-16). Deletion of aroA results in bacterial auxotrophy for aromatic amino acids and subsequent attenuation (see, e.g., U.S. Patent Publication Nos. 2003/0170276, 2003/0175297, 2012/0009153, and 2016/0369282; and International Application Publication Nos. WO 2015/032165 and WO 2016/025582). Similarly, other enzymes involved in the biosynthesis pathway for aromatic amino acids, including aroC and aroD, have been deleted to achieve attenuation (see, e.g., U.S. Patent Publication No. 2016/0369282; and International Application Publication No. WO 2016/025582). For example, S. typhimurium strain SL7207 is an aromatic amino acid auxotroph (aroA⁻ mutant); strains A1 and A1-R are leucine-arginine auxotrophs; and VNP20009/YS1646 is a purine auxotroph (purr mutant) as well as being msbB⁻. As shown herein, VNP20009/YS1646 is also auxotrophic for the immunosuppressive nucleoside adenosine, and for ATP (see, e.g., Example 1). Strains provided herein include strains derived from the strain designated YS1646, such as those that lack flagella, are pagP⁻ or modified to produce penta-acylated LPS, and include additional modifications, including complete deletion of purI and/msbB, as well as deletion of the curli fimbriae, such as by genome modifications that render the bacterium csgD⁻, and additional modifications that require various nutrients for growth, such as thyA⁻ strains. The strains also can have genome modifications that render them ansB⁻ so that they do not produce asparagine synthase, which can inhibit T cells, thereby eliminating this immunosuppressive aspect of immunostimulatory bacteria. Exemplary strains include those designated YS1646Δasd/ΔFLG/ΔpagP/ΔansB/ΔcsgD/F-ΔpurI, and YS1646Δasd/ΔFLG/ΔpagP/ΔansB/ΔcsgD/F-ΔpurI/ΔthyA. It is understood that these designations reference Salmonella genes; similar modifications can be effected in other bacterial species, such as Listeria, and E. coli, such as Nissle.

[0892] Corresponding genes, encoding homologs or orthologs of phosphoribosylaminoimidazole synthetase (PurI), and other genes required for purine synthesis in other bacterial species, also can be deleted or disrupted to achieve similar results. These genes include, but are not limited to, for example, purM, encoding phosphoribosylformylglycinamide cyclo-ligase in E. coli; purM, encoding phosphoribosylformylglycinamidine cyclo-ligase in S. typhi; purA, encoding adenylosuccinate synthetase, purQ, encoding phosphoribosylformylglycinamidine synthase IL, and purS, encoding phosphoribosylformylglycinamidine synthase subunit PurS in L. monocytogenes; purM (BL1122), encoding phosphoribosylformylglycinamidine cyclo-ligase in Bifidobacterium longum; and NT01CX_RS09765, encoding AIR synthase, and NT01CX_RS07625 (purM), encoding phosphoribosylformylglycinamidine cyclo-ligase in Clostridium novyi.

b. Adenosine Auxotrophy

[0893] Metabolites derived from the tryptophan and adenosine triphosphate (ATP)/adenosine pathways are major drivers in forming an immunosuppressive environment within the tumor/tumor microenvironment (TME). Adenosine, which exists in the free form inside and outside of cells, is an effector of immune function. Adenosine decreases T-cell receptor induced activation of NF-κB, and inhibits IL-2, IL-4, and IFN-γ. Adenosine decreases T-cell cytotoxicity, increases T-cell anergy, and increases T-cell differentiation to FOXP3⁺ or LAG3⁺ regulatory T-cells (T-reg cells, T-regs or Tregs). On natural killer (NK) cells, adenosine decreases IFN-γ production, and suppresses NK cell cytotoxicity. Adenosine blocks neutrophil adhesion and extravasation, decreases phagocytosis, and attenuates levels of superoxide and nitric oxide. Adenosine also decreases the expression of TNF-α, IL-12, and MIP-la (CCL3) on macrophages, attenuates major histocompatibility complex (MHC) Class II expression, and increases levels of IL-10 and IL-6. Adenosine immunomodulation activity occurs after its release into the extracellular space of the tumor and activation of adenosine receptors (ADRs) on the surface of target immune cells, cancer cells or endothelial cells. The high adenosine levels in the tumor microenvironment result in local immunosuppression, which limits the capacity of the immune system to eliminate cancer cells.

[0894] Extracellular adenosine is produced by the sequential activities of membrane associated ectoenzymes, CD39 (ecto-nucleoside triphosphate diphosphohydrolasel, or E-NTPDase1) and CD73 (ecto-5′-nucleotidase), which are expressed on tumor stromal cells, together producing adenosine by phosphohydrolysis of ATP or ADP produced from dead or dying cells. CD39 converts extracellular ATP (or ADP) to 5′-AMP, which is converted to adenosine by CD73. Expression of CD39 and CD73 on endothelial cells is increased under the hypoxic conditions of the tumor microenvironment, thereby increasing levels of adenosine. Tumor hypoxia can result from inadequate blood supply and disorganized tumor vasculature, impairing delivery of oxygen (see, e.g., Carroll and Ashcroft (2005) Expert. Rev. Mol. Med. 7(6), DOI: 10.1017/S1462399405009117). Hypoxia, which occurs in the tumor microenvironment, also inhibits adenylate kinase (AK), which converts adenosine to AMP, leading to very high extracellular adenosine concentrations. The extracellular concentration of adenosine in the hypoxic tumor microenvironment has been measured at 10-100 μM, which is up to about 100-1000 fold higher than the typical extracellular adenosine concentration of approximately 0.1 μM (see, e.g., Vaupel et al. (2016) Adv. Erp. Med. Biol. 876:177-183; and Antonioli et al. (2013) Nat. Rev. Can. 13:842-857). Since hypoxic regions in tumors are distal from microvessels, the local concentration of adenosine in some regions of the tumor can be higher than in others.

[0895] To direct effects to inhibit the immune system, adenosine also can control cancer cell growth and dissemination by effects on cancer cell proliferation, apoptosis and angiogenesis. For example, adenosine can promote angiogenesis, primarily through the stimulation of A_{2A} and A_{2B} receptors. Stimulation of the receptors on endothelial cells can regulate the expression of intercellular adhesion molecule 1 (ICAM-1) and E-selectin on endothelial cells, maintain vascular integrity, and promote vessel growth (see, e.g., Antonioli et al. (2013) Nat. Rev. Can. 13:842-857). Activation of one or more of A_{2A}, A_{2B}, or A₃ on various cells by adenosine can stimulate the production of the pro-angiogenic factors, such as vascular endothelial growth factor (VEGF), interleukin-8 (IL-8) or angiopoietin 2 (see, e.g., Antonioli et al. (2013) Nat. Rev. Can. 13:842-857).

[0896] Adenosine also can directly regulate tumor cell proliferation, apoptosis, and metastasis through interaction with receptors on cancer cells. For example, studies have shown that the activation of A₁ and A_{2A} receptors promote tumor cell proliferation in some breast cancer cell lines, and activation of A_{2B} receptors have cancer growth-promoting properties in colon carcinoma cells (see, e.g., Antonioli et al. (2013) Nat. Rev. Can. 13:842-857). Adenosine also can trigger apoptosis of cancer cells, and various studies have correlated this activity to activation of the extrinsic apoptotic pathway through A₃, or the intrinsic apoptotic pathway through A_{2A} and A_{2B} (see, e.g., Antonioli et al. (2013)). Adenosine can promote tumor cell migration and metastasis, by increasing cell motility, adhesion to the extracellular matrix, and expression of cell attachment proteins and receptors to promote cell movement and motility.

[0897] The extracellular release of adenosine triphosphate (ATP) occurs from stimulated immune cells, and from damaged, dying, or stressed cells. The NLR family pyrin domain-containing 3 (NLRP3) inflammasome, when stimulated by this extracellular release of ATP, activates caspase-1 and results in the secretion of the cytokines IL-1β and IL-18, which in turn activate innate and adaptive immune responses (see, e.g., Stagg and Smyth (2010) Oncogene 29:5346-5358). ATP can accumulate to concentrations exceeding 100 mM in tumor tissue, whereas levels of ATP found in healthy tissues are very low (˜1-5 μM) (see, e.g., Song et al. (2016) Am. J. Physiol. Cell Physiol. 310(2):C99-C114). ATP is catabolized into adenosine by the enzymes CD39 and CD73. Activated adenosine acts as a highly immunosuppressive metabolite via a negative-feedback mechanism and has a pleiotropic effect against multiple immune cell types in the hypoxic tumor microenvironment (see, e.g., Stagg and Smyth (2010) Oncogene 29:5346-5358). Adenosine receptors A_{2A} and A_{2B} are expressed on a variety of immune cells and are stimulated by adenosine to promote cAMP-mediated signaling changes, resulting in immunosuppressive phenotypes of T-cells, B-cells, NK cells, dendritic cells (DCs), mast cells, macrophages, neutrophils, and natural killer T (NKT) cells. As a result, adenosine levels can accumulate to over one hundred times their normal concentration in pathological tissues, such as solid tumors, which have been shown to overexpress ecto-nucleotidases, such as CD73. Adenosine also has been shown to promote tumor angiogenesis and development. An engineered bacterium that is auxotrophic for adenosine would thus exhibit enhanced tumor-targeting and colonization.

[0898] Immunostimulatory bacteria, such as Salmonella typhi, can be made auxotrophic for adenosine, for example, by deletion of the tsr gene (see, e.g., Bucarey et al. (2005) Infection and Immunity 73(10):6210-6219) or by deletion of purD (see, e.g., Husseiny (2005) Infection and Immunity 73(3):1598-1605). In the Gram-negative bacteria Xanthomonas oryzae, a purD gene knockout was shown to be auxotrophic for adenosine (see, e.g., Park et al. (2007) FEMS Microbiol. Lett. 276:55-59). As exemplified herein, S. typhimurium strain VNP20009 is auxotrophic for adenosine due to its purI modification; hence, further modification to render it auxotrophic for adenosine is not required. Hence, embodiments of the immunostimulatory bacterial strains, as provided herein, are auxotrophic for adenosine. Such auxotrophic bacteria selectively replicate in the tumor microenvironment, further increasing accumulation and replication of the administered bacteria in tumors, and decreasing the levels of adenosine in and around tumors, thereby reducing or eliminating the immunosuppression caused by the accumulation of adenosine. Exemplary of such bacteria, provided herein, is a modified strain of S. typhimurium containing purI⁻/msbB⁻ mutations to provide adenosine auxotrophy. For other strains and bacteria, the purI gene can be disrupted as it has been in VNP20009, or it can contain a deletion of all or a portion of the purI gene, which ensures that there cannot be a reversion to a wild-type gene. As described elsewhere herein, in strain VNP20009, the purI gene was inactivated by inversion. Similarly, the msbB gene in VNP20009 was not completely deleted. As exemplified herein, strains in which the purI and msbB genes have been completely deleted to eliminate any risk of reversion, demonstrate superior fitness as assessed by growth of cultures in vitro.

[0899] Immunostimulatory bacteria modified by rendering them auxotrophic for one or more essential nutrients, such as purines (for example, adenine), nucleosides (for example, adenosine), amino acids (for example, aromatic amino acids, arginine, and leucine), or adenosine triphosphate (ATP), are employed. In particular, in embodiments of the immunostimulatory bacteria provided herein, such as strains of S. typhimurium, the bacteria are rendered auxotrophic for adenosine, and optionally, for ATP, and preferentially accumulate in tumor microenvironments (TMEs). Hence, strains of immunostimulatory bacteria described herein are attenuated because they require purines, adenosine, and/or ATP for growth, and they preferentially colonize TMEs, which, as discussed below, have an abundance of these metabolites. Because adenosine accumulation that occurs in the tumor microenvironment of some tumors is immunosuppressive, adenosine auxotrophy eliminates the immunosuppression from adenosine that accumulates in the tumor microenvironment.

c. Thymidine Auxotrophy

[0900] Genome modifications can be introduced in place of or in addition to the inactivation/deletion (see section 3) discussed below. Other deletions or inactivation of genes or gene products required for growth, such as genes that produce nutrients, can be used in place of or in addition to, for example, the asd inactivation/deletion. These include, for example, modifications that render the bacteria thyA− (see, e.g., Loessner et al. (2006) FEBS Lett. 265:81-88). Immunostimulatory bacteria that are thyA⁻ have genome modifications, such as insertions, deletions, replacements, transpositions, and/or other changes, that result in inactive or eliminate production of thymidylate synthase. Thymidylate synthase catalyzes the reductive methylation of dUMP to dTMP, a DNA biosynthesis precursor (precursor to dTTP).

[0901] Elimination of expression or production or other attenuating mutations of the bacterial genome for production of such products results in release of encoded macromolecules upon bacterial cell death in vivo after administration. Asd, as discussed below, is an essential enzyme for bacterial cell wall synthesis; ThyA is an enzyme needed for DNA synthesis. Mutation of the respective genes renders the strain auxotrophic for diaminopimelic acid (DAP) or thymidine monophosphate precursors. Upon deprivation of the complementing substrates, such bacteria die by DAP-less or thymine-less death, resulting in release of bacterial proteins and plasmid. Inactivation or elimination of Asd, results in release of macromolecules. Elimination or inactivation of ThyA (to produce ΔthyA bacteria, which includes those with insertions, deletions, and other modifications so that active enzyme is not produced) expression/activity does not result in release of macromolecules, including proteins and plasmid, upon thymidine starvation (Loessner et al. (2006) FEBS Lett. 265:81-88).

[0902] Thus, ΔthyA bacteria, in which the genome is modified so that active enzyme is not produced, are advantageous, for example, for in vivo delivery of plasmids to host cells, since the bacteria do not prematurely release their contents. Since the bacteria provided herein infect or accumulate in myeloid cells, such as phagocytic cells, such as macrophages, dendritic cells, monocytes, and neutrophils, which consume bacteria, the intact ΔthyA bacteria, release the plasmid encoding the payloads, such as therapeutic products, inside the targeted cells for, for example, expression, if RNA, or secretion or presentation, if protein. Thus, genome modifications that render the bacteria thyA⁻ have advantages for particular applications, such as immunization, presentation on cells, delivery of RNA, and other such applications.

### 3. Plasmid Maintenance and Delivery

### a. asd Deletion

[0903] As discussed above, the bacteria can be rendered thyA⁻; they also can be rendered asd⁻ instead or in addition. The selection of the particular genome modification depends upon the intended application of the bacteria. thyA inactivation is advantageous for some applications; for others rendering the bacteria asd⁻ is advantageous; it is within the skill of the skilled person to select the particular modification(s). The asd gene in bacteria encodes an aspartate-semialdehyde dehydrogenase. asd⁻ mutants of S. typhimurium have an obligate requirement for diaminopimelic acid (DAP), which is required for cell wall synthesis, and will undergo lysis in environments deprived of DAP. This DAP auxotrophy can be used for plasmid selection and maintenance of plasmid stability in vivo, without the use of antibiotics, when the asd gene is complemented in trans on a plasmid in the bacterium. Non-antibiotic-based plasmid selection systems are advantageous, and allow for 1) the use of administered antibiotics as a rapid clearance mechanism in the event of adverse symptoms, and 2) for antibiotic-free scale up of production, where such use is commonly avoided. The asd gene complementation system provides for such non-antibiotic-based plasmid selection (see, e.g., Galán et al. (1990) Gene 94(1):29-35). The use of the asd gene complementation system to maintain plasmids in the tumor microenvironment is expected to increase the potency of S. typhimurium strains engineered to deliver plasmids encoding genetic payloads/therapeutic products, such as immunostimulatory proteins (e.g., cytokines, chemokines, co-stimulatory molecules); cytosolic DNA/RNA sensors that induce type I IFN, such as STING and IRF3, and gain-of-function/constitutively active mutants thereof, antibodies and fragments thereof (e.g., checkpoint inhibitors, or anti-IL-6 or anti-VEGF antibodies); bi-specific T-cell engagers (sold under the trademark BiTEs®); interfering RNAs; and other therapeutic products as discussed elsewhere herein and known in the art; and complementary combinations of all of the preceding therapeutic products.

[0904] An alternative use for an asd mutant of S. typhimurium is to exploit the DAP auxotrophy to produce an autolytic (or suicidal) strain, for delivery of therapeutic products/macromolecules to infected cells, without the ability to persistently colonize host tumors. Deletion of the asd gene makes the bacteria auxotrophic for DAP when grown in vitro or in vivo. An example described herein, provides an asd deletion strain that is auxotrophic for DAP, and that contains a plasmid suitable for delivery of immunomodulatory proteins, but that does not contain an asd complementing gene, resulting in a strain that is defective for replication in vivo. This strain is propagated in vitro in the presence of DAP, and grows normally, and then is administered as an immunotherapeutic agent to a mammalian host where DAP is not present. The suicidal strain is able to invade host cells but is not able to replicate due to the absence of DAP in mammalian tissues, lysing automatically, and delivering its cytosolic contents (e.g., plasmids or proteins).

[0905] Corresponding genes, encoding homologs or orthologs of aspartate-semialdehyde dehydrogenase (asd) in other bacterial species, also can be deleted or disrupted to achieve similar results. These genes include, but are not limited to, for example, asd, encoding aspartate-semialdehyde dehydrogenase in E. coli; asd (STY4271), encoding aspartate-semialdehyde dehydrogenase in S. typhi; asd (lmo1437), encoding aspartate-semialdehyde dehydrogenase in L. monocytogenes; asd (BL0492), encoding aspartate-semialdehyde dehydrogenase in Bifidobacterium longum; and NT01CX_RS04325 (asd), encoding aspartate-semialdehyde dehydrogenase in Clostridium novyi. Similarly, as discussed, above, thyA can be inactivated or eliminated by genome modification in place of the asd modification. As discussed above, inactivation or elimination of thymidylate synthase expression/activity does not result in release of macromolecules, including proteins and plasmids, upon thymidine starvation.

b. endA Deletion/Disruption

[0906] The endA gene (see, for example, SEQ ID NO:250) encodes an endonuclease (DNA-specific endonuclease I; see, for example, SEQ ID NO:251) that mediates degradation of double-stranded DNA (dsDNA) in the periplasm of Gram-negative bacteria. Most common strains of laboratory E. coli are endA-, as a mutation in the endA gene allows for higher yields of plasmid DNA. This gene is conserved among species. To facilitate intact plasmid DNA delivery, the endA gene of the engineered immunostimulatory bacteria is deleted or mutated to prevent its endonuclease activity. Exemplary of such mutations is an E208K amino acid substitution (see, e.g., Durfee et al. (2008) J. Bacteriol. 190(7):2597-2606), or a corresponding mutation in the species of interest. endA, including residue E208, is conserved among bacterial species, including Salmonella. Thus, the E208K mutation can be used to eliminate endonuclease activity in other species, including Salmonella species. Those of skill in the art can introduce other mutations or deletions to eliminate endA activity. Effecting this mutation, or deleting or disrupting the gene to eliminate activity of endA in the immunostimulatory bacteria herein, such as in Salmonella, increases efficiency of intact plasmid DNA delivery, thereby increasing expression of any one, or two, or more, immunomodulatory proteins/therapeutic products encoded on the plasmid, and enhancing the anti-tumor immune response and anti-tumor efficacy.

### 4. Flagellin Knockout Strains

[0907] Flagella are organelles on the surface of bacteria that are composed of a long filament that is attached, via a hook, to a rotary motor that can rotate in a clockwise or counterclockwise manner to provide a means for locomotion. Flagella, for example, in S. typhimurium, are important for chemotaxis and for establishing an infection via the oral route, due to the ability to mediate motility across the mucous layer in the gastrointestinal tract. While flagella have been demonstrated to be required for chemotaxis to and colonization of tumor cylindroids in vitro (see, e.g., Kasinskas and Forbes (2007) Cancer Res. 67(7):3201-3209), and motility has been shown to be important for tumor penetration (see, e.g., Toley and Forbes (2012) Integr. Biol. (Camb) 4(2):165-176), flagella are not required for tumor colonization in animals when the bacteria are administered intravenously (see, e.g., Stritzker et al. (2010) International Journal of Medical Microbiology 300:449-456). Each flagellar filament is composed of tens of thousands of flagellin subunits. The S. typhimurium chromosome contains two genes, fliC and fljB, that encode antigenically distinct flagellin monomers. Mutants defective for both fliC and fljB are nonmotile and avirulent when administered via the oral route of infection, but maintain virulence when administered parenterally.

[0908] Flagellin is a major pro-inflammatory determinant of Salmonella (see, e.g., Zeng et al. (2003) J. Immunol. 171:3668-3674), and is directly recognized by TLR5 on the surface of cells, and by NLCR4 in the cytosol (see, e.g., Lightfield et al. (2008) Nat. Immunol. 9(10):1171-1178). Both pathways lead to pro-inflammatory responses resulting in the secretion of cytokines, including IL-1β, IL-18, TNF-α, and IL-6. Attempts have been made to make Salmonella-based cancer immunotherapy more potent by increasing the pro-inflammatory response to flagellin by engineering the bacteria to secrete Vibrio vulnificus flagellin B, which induces greater inflammation than flagellin encoded by fliC and fljB (see, e.g., Zheng et al. (2017) Sci. Transl. Med. 9(376):eaak9537).

[0909] Herein, Salmonella bacteria, such as S. typhimurium, are engineered to lack both flagellin subunits fliC and fljB, to reduce TLR5-mediated pro-inflammatory signaling. Other bacteria that contain flagella similarly can be engineered to eliminate flagella, and to include other modifications that have the substantially the same effects as the exemplified modifications of Salmonella. For example, as shown herein, a Salmonella strain lacking msbB and/or pagP, which results in reduced TNF-alpha induction, is combined with elimination of flagella, which can be achieved in Salmonella by fliC and fljB knockouts. This results in a Salmonella strain that has a combined reduction in, among other effects, TNF-alpha induction and a reduction in TLR5 recognition. These bacterial modifications, msbB⁻, pagP⁻, fliC⁻, and fljB⁻, can be combined with an immunostimulatory plasmid, optionally containing CpGs, encoding therapeutic products, such as immunomodulatory proteins, and combinations of products. The resulting bacteria have reduced pro-inflammatory signaling, but robust anti-tumor activity. These genome modifications can be combined with others of the genome modifications described herein as well. For vaccines, the encoded products can include antigens and proteins against which an immmunoprotective or therapeutic response is intended.

[0910] For example, as exemplified and provided herein, a fliC and fljB double mutant was constructed in the asd-deleted strain of S. typhimurium, VNP20009. VNP20009, which is attenuated for virulence by disruption of purI/purM, and which contains a modification of the msbB gene (a partial deletion) that results the in production of a lipid A subunit that is less toxigenic than wild-type lipid A. This results in reduced TNF-α production in a mouse model after intravenous administration, compared to strains with wild-type lipid A. The resulting strain is exemplary of strains that are attenuated for bacterial inflammation by modification of lipid A to reduce TLR2/4 signaling, and by deletion of expression of the flagellin subunits to reduce TLR5 recognition and inflammasome induction.

[0911] Pathogenesis in certain bacterial species, including Salmonella species, such as S. typhimurium, involves a cluster of genes referred to as Salmonella pathogenicity islands (SPIs). Salmonella invades non-phagocytic intestinal epithelial cells using a type 3 secretion system (T3SS) encoded by the Salmonella pathogenicity island 1 (SPI-1), which forms a needle-like structure that injects effector proteins directly into the cytosol of host cells. These effector proteins lead to rearrangement of the eukaryotic cell cytoskeleton to facilitate invasion of the intestinal epithelium, and also induces proinflammatory cytokines. The SPI designated SPI-1 mediates invasion of epithelial cells. SPI-1 genes include, but are not limited to: avrA, hilA, hilD, invA, invB, invC, invE, invF, invG, invH, invI, invJ, iacP, iagB, spaO, spaP, spaQ, spaR, spaS, orgA, orgB, orgC, prgH, prgI, prgJ, prgK, sicA, sicP, sipA, sipB, sipC, sipD, sirC, sopB, sopD, sopE, sopE2, sprB, and sptP. Deletion of one or more of these genes reduces or eliminates the ability of the bacterium to infect epithelial cells, but does not affect their ability to infect or invade phagocytic cells, including phagocytic immune cells. For example, it was demonstrated that deletion of both the fliC and fljB genes significantly reduced expression of SPI-1 genes, such as hilA, hilD, invA, invF, and sopB, thereby reducing the ability to invade non-phagocytic cells (see, e.g., Elhadad et al. (2015) Infect. Immun. 83(9):3355-3368).

[0912] In bacteria such as Salmonella, flagellin, in addition to the SPI-1 type 3 secretion system (T3SS), is necessary for triggering pyroptosis in macrophages, and can be detected by the macrophage NLRC4 inflammasome. Elimination of flagellin subunits decreases pyroptosis in macrophages. For example, S. typhimurium with deletions in fliC and fljB results in significantly reduced IL-1β secretion compared to the wild-type strain, whereas cellular uptake and intracellular replication of the bacterium remains unaffected. This demonstrates that flagellin plays a significant role in inflammasome activation. Additionally, S. typhimurium strains engineered to constitutively express fliC were found to induce macrophage pyroptosis (see, e.g., Li et al. (2016) Scientific Reports 6:37447; Fink and Cookson (2007) Cellular Microbiology 9(11):2562-2570; and Winter et al. (2015) Infect. Immun. 83(4):1546-1555).

[0913] The genome of the immunostimulatory bacteria herein can be modified to delete or mutate the flagellin genes fliC and fljB in S. typhimurium, leading to decreased cell death of tumor-resident immune cells, such as macrophages, and enhancing the anti-tumor immune response of the immunostimulatory bacteria.

[0914] Deletion of the flagellin subunits, combined with modification of the LPS, allows for greater tolerability in the host, limits uptake into only phagocytic cells and decreases their pyroptotic cell death, and directs the immunostimulatory response towards delivery of therapeutic products, such as immunomodulatory proteins, to the TME, particularly tumor-resident myeloid cells. The resulting immunostimulatory bacteria elicit an anti-tumor response, and promote an adaptive immune response to the tumor.

[0915] Corresponding genes, encoding flagellin in other bacterial species, also can be deleted to achieve similar results. These genes include, but are not limited to, for example, fliC, encoding flagellar filament structural protein, and fliE, encoding flagellar basal-body protein FliE in E. coli; fliC, encoding flagellin and flgB, encoding flagellar basal-body rod protein FlgB, in S. typhi; flaA encoding flagellin, fliE, encoding flagellar hook-basal body protein FliE, and flgB, encoding flagellar basal-body rod protein FlgB, in L. monocytogenes; and NT01CX_RS04995, NT01CX_RS04990, NT01CX_RS05070 and NT01CX_RS05075, encoding flagellin, NT01CX_RS05080 (flgB), encoding flagellar basal body rod protein FlgB, NT01CX_RS05085 (flgC), encoding flagellar basal body rod protein FlgC, and NT01CX_RS05215 (flgG), encoding flagellar basal body rod protein FlgG, in Clostridium novyi.

### 5. Engineering Bacteria to Promote Adaptive Immunity and Enhance T-Cell Function

L-Asparaginase II (ansB) Deletion/Disruption

[0916] L-asparaginase II is an enzyme that catalyzes conversion of L-asparagine to ammonia and aspartic acid. Several bacterial strains, such as E. coli and S. typhimurium, utilize L-asparaginase to scavenge fructose-asparagine as a carbon and nitrogen source (see, e.g., Sabag-Daigle et al. (2018) Appl. Environ. Microbiol. 84(5):e01957-17). Malignant T-cells, such as in acute lymphoblastic leukemia (ALL), require asparagine as they lack the enzymes to synthesize it. Administration of L-asparaginases has been a frontline therapy for ALL since the early 1970's (see, e.g., Batool et al. (2016) Appl. Biochem. Biotechnol. 178(5):900-923). Production of L-asparaginase II by S. typhimurium is both necessary and sufficient for T-cell inhibition, as it directly induces T-cell receptor (TCR) downregulation, decreases T-cell cytokine production, and inhibits tumor cytolytic function (see, e.g., Kullas et al. (2012) Cell Host Microbe 12(6)791-798; and van der Velden et al. (2005) Proc. Natl. Acad. Sci. U.S.A. 102(49):17769-17774). Under rapid clonal expansion conditions, such as those that occur during T-cell activation in the tumor microenvironment, asparagine is required, and its depletion by L-asparaginase II leads to T-cell suppression. L-asparaginase II, thus, has been used as an anti-cancer therapeutic for cancers in which T-cell suppression is a therapeutic modality.

[0917] In contrast to the prior uses of L-asparaginase as an anti-cancer therapeutic, it is shown herein that elimination of L-asparaginase activity in the immunostimulatory bacteria provided herein, and in other immunostimulatory bacteria and bacterial vaccines, such as the BCG vaccine used for vaccinating against tuberculosis (TB) and other diseases, enhances the function of T-cells in the tumor microenvironment. Elimination of L-asparaginase activity can be effected by modifying the bacterial genome to eliminate expression of active enzyme. Modifications include insertions, deletions, replacements, and other changes in the nucleic acids, so that the resulting encoded enzyme is not active, or not expressed, or is eliminated. It is shown herein that deletion of all or of a part of the gene that encodes L-asparaginase IL, ansB, or disruption thereof, to eliminate expression of the encoded enzyme in the immunostimulatory bacteria, enhances the function of T-cells in a bacterially-colonized tumor microenvironment. Inhibition of L-asparaginase II activity is accomplished by deletion of all or of a part of, or interruption/disruption of, the gene ansB in the immunostimulatory bacteria, whereby L-asparaginase II is not produced. Thus, provided are immunostimulatory bacteria whose genomes are modified so that L-asparaginase II is not produced. Immunostimulatory bacteria provided herein are employed to colonize tumor-resident immune cells to enhance the anti-tumor immune response; included among the bacterial genome modifications are deletions, insertions, disruptions, and/or other modifications that eliminate the expression of L-asparaginase II.

[0918] As shown herein, the genome of the immunostimulatory bacteria herein can be modified to delete ansB, or to disrupt it or to otherwise modify it, to result in inactive encoded L-asparaginase IL, or to eliminate the asparaginase, thereby preventing T-cell suppression, and enhancing the anti-tumor T-cell function in vivo. It is shown herein that strains in which ansB is intact induce profound T-cell immunosuppression in T-cells co-localized with the strain. Strains in which ansB is deleted do not induce immunosuppression, thus, solving another problem in the art in using bacteria to deliver encoded therapeutic products to tumors. Immunostimulatory bacteria that combine modifications, such as deletions or disruptions, of the ansB gene, whereby functional encoded enzyme is not expressed, with other modifications described herein that result in increased accumulation in the tumor microenvironment and/or in tumor-resident immune cells, provide superior therapeutic immunostimulatory bacteria.

[0919] Corresponding genes, encoding homologs or orthologs of L-asparaginase II (AnsB) in other bacterial species, also can be deleted or disrupted to achieve similar results. These genes include, but are not limited to, for example, ansB, encoding L-asparaginase 2 in E. coli; ansB (STY3259), encoding L-asparaginase in S. typhi; ansB (lmo1663), encoding asparagine synthetase in L. monocytogenes; and BL1142, encoding an L-asparaginase precursor in Bifidobacterium longum.

### 6. Deletions/Disruptions in Salmonella Genes Required to Produce Curli Fimbriae

[0920] Bacteria and fungi are capable of forming multicellular structures called biofilms. Bacterial biofilms are encased within a mixture of secreted and cell wall-associated polysaccharides, glycoproteins, and glycolipids, as well as extracellular DNA, known collectively as extracellular polymeric substances. These extracellular polymeric substances protect the bacteria from multiple insults, such as cleaning agents, antibiotics, and antimicrobial peptides. Bacterial biofilms allow for colonization of surfaces, and are a cause of significant infection of prosthetics, such as injection ports and catheters. Biofilms also can form in tissues during the course of an infection, which leads to increases in the duration of bacterial persistence and shedding, and limits the effectiveness of antibiotic therapies. Chronic persistence of bacteria in biofilms is associated with increased tumorigenesis, for example in S. typhi infection of the gall bladder (see, e.g., Di Domenico et al. (2017) Int. J. Mol. Sci. 18:1887).

csgD Deletion

[0921] In Salmonella, such as S. typhimurium, biofilm formation is regulated by the csgD gene, which activates the csgBAC operon, and results in increased production of the curli fimbriae subunits CsgA and CsgB (see, e.g., Zakikhany et al. (2010) Molecular Microbiology 77(3):771-786). CsgA is recognized as a PAMP by TLR2, and induces production of IL-8 from human macrophages (see, e.g., Tukel et al. (2005) Molecular Microbiology 58(1):289-304). Also, csgD indirectly increases cellulose production by activating the adrA gene that encodes for di-guanylate cyclase. The small molecule cyclic di-guanosine monophosphate (c-di-GMP), generated by adrA, is a ubiquitous secondary messenger that occurs in almost all bacterial species. Increases in c-di-GMP enhance expression of the cellulose synthase gene bcsA, which in turn increases cellulose production via stimulation of the bcsABZC and bcsEFG operons, leading to cellulose biofilm formation. As a result, bacteria, such as S. typhimurium, can form biofilms in solid tumors as protection against phagocytosis by host immune cells. Bacterial mutants, such as Salmonella mutants, that cannot form biofilms, are taken up more rapidly by host phagocytic cells, and are more readily cleared from infected tumors (see, e.g., Crull et al. (2011) Cellular Microbiology 13(8):1223-1233). This increase in intracellular localization within phagocytic cells can reduce the persistence of extracellular bacteria, and, as shown herein, can enhance the effectiveness of plasmid delivery of therapeutic products, such as immunomodulatory proteins and other anti-cancer therapeutics, as described herein. Reduction in the capability of immunostimulatory bacteria, such as S. typhimurium, to form biofilms, can be achieved through deletion or disruption of genes involved in biofilm formation, such as, for example, csgD, csgA, csgB, adrA, bcsA, bcsB, bcsZ, bcsE, bcsF, bcsG, dsbA, or dsbB (see, e.g., Anwar et al. (2014) PLoS ONE 9(8):e106095).

[0922] It is shown herein that engineering the immunostimulatory bacteria to reduce biofilm formation increases clearance rates from tumors/tissues, increasing tolerability of the therapy, and prevents colonization of prosthetics in patients, thereby increasing the therapeutic benefit of these strains. It is known that adenosine mimetics inhibit S. typhimurium biofilm formation, indicating that the high adenosine concentration in the tumor microenvironment can contribute to tumor-associated biofilm formation (see, e.g., Koopman et al. (2015) Antimicrob. Agents Chemother. 59:76-84). It is shown herein that csgD-deleted immunostimulatory bacterial strains demonstrate improved anti-tumor efficacy because of greater bacterial uptake into tumor-resident myeloid cells. Similar genome modifications can be effected in other bacterial strains, such as E. coli and Listeria, that alter biofilm formation and/or curli fimbriae production, so that the bacteria can better infiltrate the vasculature, such as that present in tumors and the tumor microenvironment.

[0923] Corresponding genes, encoding homologs and orthologs of csgD, and other genes that are required for curli fimbriae and biofilm formation in other bacterial species, also can be deleted or disrupted or otherwise modified to achieve similar results. These genes include, but are not limited to, for example, csgD, encoding DNA-binding transcriptional dual regulator CsgD in E. coli; csgD (STY1179), encoding regulatory protein CsgD in S. typhi; and lcp, encoding the Listeria cellulose binding protein that is involved in biofilm formation in L. monocytogenes.

[0924] Modification of the bacterial genome, such as by deletion or disruption of genes to render the bacteria csgD⁻, results changes, such as one or more of elimination of curli fimbriae and inflammatory cyclic dinucleotides (CDNs), and removes cellulose secretion. This eliminates inflammatory and immunosuppressive elements, prevents TLR4 recognition through altered lipid A acylation, and eliminates cellulose secretion, and, thus, possible biofilm formation, thereby increasing safety and efficacy.

[0925] As described herein, bacterial strains, such as S. typhimurium strains, that are engineered to be auxotrophic for adenosine; and are reduced in their ability to induce pro-inflammatory cytokines by modification of the LPS and/or deletion of flagellin; and/or that do not express L-asparaginase II to improve T-cell function; and/or that contain deletions or disruptions of genes required for biofilm formation; and/or that are further modified to maintain significant plasmid copy number per cell, at least low to medium copy number or higher, in the absence of antibiotic selection; and that deliver genetic expression cassettes encoding therapeutic products, promote robust anti-tumor immune responses. The plasmids include regulatory sequences to promote secretion of the encoded therapeutic products into the tumor microenvironment.

### 7. Improving Resistance to Complement

[0926] The complement system is the first line of immune defense against invading pathogens that directly activate the lectin pathway or the alternative pathway (AP) cascades in the human host. The complement system involves more than 30 soluble and cell-membrane bound proteins that function in the innate immune response to recognize and kill pathogens, such as bacteria, virus-infected cells, and parasites, and also, that play a role in the antibody-mediated immune response. Activation of the complement cascade leads to opsonization of foreign microbes, release of chemotactic peptides, and finally, to disruption of bacterial cell membranes. Three homologous glycoproteins in the complement system, C3, C4, and C5, play a central role in complement function and interact with other complement components. C3b and C4b, generated from C3 and C4, respectively, are important components of convertases that promote activation of the complement cascade. The cleavage fragments of C5 are C5a, which induces migration of phagocytes into the infection site, and C5b, which initiates the formation of the membrane attack complex (MAC), and bacterial lysis (see, e.g., Ramu et al. (2007) FEBS Letters 581:1716-1720).

[0927] To survive, pathogens have developed strategies to prevent deleterious consequences of complement activation. For example, members of the Ail/Lom family of outer membrane proteins provide protection from complement-dependent killing for a number of pathogenic bacteria. Members of the Ail/Lom family, which include Ail (attachment invasion locus) of Yersinia species, e.g., Y. enterocolitica and Y. pseudotuberculosis, Rck (resistance to complement killing) and PagC of Salmonella species, and OmpX of Escherichia coli, are outer membrane proteins that share significant amino acid sequence similarity and identity, and have similar membrane topologies. While members of this family of proteins exhibit diverse functions, several of them, including Ail of Y. enterocolitica and Y. pseudotuberculosis, as well as Rck of S. enterica, function, at least in part, to protect bacteria from complement-mediated lysis (see, e.g., Bartra et al. (2008) Infection and Immunity 76:612-622).

[0928] Another bacterial product that aids in avoiding or mitigating complement is the surface protease, designated PgtE (outer membrane serine protease) in Salmonella, and other members of the omptin family. The surface protease PgtE of S. enterica belongs to the omptin family of enterobacterial outer membrane aspartate proteases. PgtE and other omptins require rough LPS to be active, but are sterically inhibited by the O-antigen. Expression of pgtE is upregulated during the growth of Salmonella inside macrophages, and the bacteria released from macrophages exhibit strong PgtE-mediated proteolytic activity. PgtE proteolytically activates the mammalian plasma proenzyme plasminogen to plasmin, inactivates the main physiological inhibitor of plasmin, alpha 2-antiplasmin, and mediates bacterial adhesion to extracellular matrices of human cells. This way, PgtE mediates the degradation of extracellular matrix components and generates potent, localized proteolytic activity, which can promote migration of Salmonella across extracellular matrices. PgtE also degrades alpha-helical antimicrobial peptides which can be important during intracellular growth of Salmonella. The omptin Pla of Yersinia pestis is a close ortholog of PgtE and shares functions with PgtE. Pla cleaves C3, and PgtE increases serum resistance of Salmonella by cleaving complement components C3b, C4b, and C5. The gene pgtE, and orthologs thereof from other bacterial species, can be included in the immunostimulatory bacteria herein to increase resistance to complement.

[0929] It is shown herein that the effects of complement in human serum explain the failure of therapeutic immunostimulatory bacteria, such as the Salmonella strain VNP20009, which had been shown to effectively colonize tumors in rodent models. Systemic administration of VNP20009 resulted in colonization of mouse tumors (see, e.g., Clairmont et al. (2000) J. Infect. Dis. 181:1996-2002; and Bermudes et al. (2001) Biotechnol. Genet. Eng. Rev. 18:219-33); whereas systemic administration of VNP20009 in human patients resulted in very little colonization. In the Phase 1 Study in advanced melanoma patients, very little VNP20009 was detected in human tumors after a 30 minute intravenous infusion (see, Toso et al. (2002) J. Clin. Oncol. 20:142-52). Patients that entered into a follow-up study evaluating a longer, four-hour infusion of VNP20009, also demonstrated a lack of detectable VNP20009 after tumor biopsy (see, Heimann et al. (2003) J. Immunother. 26:179-180). Following intratumoral administration, colonization of a derivative of VNP20009 was detected (see, Nemunaitis et al. (2003) Cancer Gene Ther. 10:737-744). Direct intratumoral administration of VNP20009 to human tumors resulted in much higher tumor colonization, indicating that human tumors can be colonized at a high level, and that the difference in tumor colonization between mice and humans occurs only after systemic administration.

[0930] It is shown and described herein, that, while not previously known to occur in wild-type S. typhimurium, VNP20009 is inactivated by human complement, which explains the low tumor colonization observed in humans upon systemic administration of VNP20009. Strains provided herein exhibit resistance to complement. They can be modified to express Rck and other proteins involved in mediating complement resistance or avoidance, such as Ail of Yersinia enterocolitica, or PgtE of Salmonella typhimurium, or, if they natively express such a protein, they can be modified to overexpress Rck and/or other such proteins. Rck can be introduced into bacteria, such as E. coli, that lack a homolog.

### Rck Expression

[0931] Rck (resistance to complement killing) is a 17 kDa outer membrane protein encoded by the large virulence plasmid of Salmonella species, such as S. enteritidis and S. typhimurium, that induces adhesion to and invasion of epithelial cells. The Rck protein has been shown to protect S. enterica from complement by inhibiting C9 polymerization and subsequent assembly of a functional membrane attack complex. An rck mutant exhibited a 2-3 fold decrease in epithelial cell invasion compared to the wild-type strain, while rck overexpression in wild-type strains leads to increased invasion. The Rck protein induces cell entry by a receptor-mediated process, promoting local actin remodeling, and weak and closely adherent membrane extensions. Thus, Salmonella can enter cells by two distinct mechanisms: the Trigger mechanism mediated by the T3SS-1 complex, and a Zipper mechanism induced by rck (see, e.g., Manon et al. (2012), Salmonella, Chapter 17, eds. Annous and Gurtler, Rijeka, pp. 339-364). Expression of rck on the Salmonella virulence plasmid confers a high level of resistance to neutralization by human complement, by preventing the formation of the membrane attack complex. When the S. typhimurium virulence plasmid containing rck was expressed in a highly serum-sensitive strain of E. coli, Rck was able to restore complement resistance.

[0932] The immunostimulatory bacteria provided herein retain, or are provided with, Rck to confer resistance to human complement. It is shown herein that immunostimulatory bacteria, such as E. coli, can be modified by encoding rck on a plasmid in the bacteria to thereby confer resistance to complement. Immunostimulatory bacteria provided herein encode rck, either endogenously, or can be modified to encode it in order to increase resistance to complement. Methods for conferring resistance to complement also are provided. For example, the therapeutic E. coli species described in U.S. Patent Application Publication Nos. 2018/0325963 and 2018/0273956, and U.S. Pat. Nos. 9,889,164 and 9,688,967, can be improved by modifying the bacteria therein, such as by introducing nucleic acid encoding the Salmonella rck gene on a plasmid therein, to thereby improve or provide resistance to complement. Bacteria that are resistant to complement can be systemically administered, and sufficient bacteria can survive to be therapeutically effective.

[0933] Nucleic acids encoding the Salmonella rck gene are introduced into bacteria, such as therapeutic E. coli, to thereby confer or increase complement resistance.

[0934] Other orthologs and homologs of rck from other bacterial species, similarly can be expressed in the immunostimulatory bacteria. For example, Ail is an Rck homolog from Yersinia enterocolitica, which enhances complement resistance under heterologous expression. PgtE is an S. typhimurium surface protease that has also been shown to enhance complement resistance under heterologous expression.

### 8. Deletions of Genes Required for Lipoprotein Expression in Salmonella and Other Gram-Negative Bacteria

[0935] The LPS and Braun (murein) lipoprotein (Lpp) are major components of the outer membrane of Gram-negative enteric bacteria that function as potent stimulators of inflammatory and immune responses. Braun (murein) lipoprotein (Lpp) is one of the most abundant components of the outer membrane in S. typhimurium, and leads to TLR2 induction of pro-inflammatory cytokines, such as TNFα, IL-6, and IL-8 (in humans). Two functional copies of the lipoprotein gene (lppA (SEQ ID NO:387) and lppB (SEQ ID NO:388), that are located on the bacterial chromosome of Salmonella, contribute to bacterial virulence. Deletion of the lppA and lppB genes, and elimination of lipoprotein expression, reduces virulence and decreases pro-inflammatory cytokine production (see, e.g., Sha et al. (2004) Infect. Immun. 72(7):3987-4003; and Fadl et al. (2005) Infect. Immun. 73(2):1081-1096). Deletion of the lpp genes would be expected to reduce infection of cells, and, thus, decrease plasmid delivery and expression of the encoded therapeutic products or proteins. As shown in Example 18 below, however, while deletion of these genes did reduce tumor colonization, the amount of plasmid delivered to the targeted cells, i.e., the tumor-resident immune cells, particularly macrophages, significantly was increased. As shown herein, deletion or disruption of these genes (lppA and lppB), thus, results in decreased virulence due to the inability to survive in infected macrophages, but results in enhanced plasmid delivery by the immunostimulatory bacteria, thereby increasing the expression of encoded therapeutic genes in the targeted cells, i.e., the tumor-resident immune cells, particularly macrophages.

[0936] Strains provided herein are ΔFLG (lack flagella), and/or ΔpagP, and/or ΔansB, and/or ΔcsgD. Additionally, the strains are one or more of ΔpurI (ΔpurM), ΔmsbB, and Δasd (in the bacterial genome). Exemplary strains are ΔpurI (ΔpurM), ΔmsbB, ΔpagP, ΔansB, Δasd, or ΔthyA in place of Δasd. The strains also can be lppA- and/or lppB⁻, particularly lppA⁻/lppB⁻. The plasmid is modified to encode therapeutic products under control of host-recognized promoters (e.g., eukaryotic promoters, such as RNA polymerase II promoters, including those from eukaryotes, and from animal viruses). The plasmids can encode asd to permit bacterial replication in vivo, and can encode nucleic acids with other beneficial functions (such as CpGs), and can encode gene products, as described elsewhere herein.

[0937] The immunostimulatory bacteria provided herein can be modified to eliminate the ability to infect epithelial cells, such as by elimination of the flagella. Elimination of the ability to infect epithelial cells, as described elsewhere herein, also can be achieved by inactivating SPI-1-dependent invasion, through inactivation or knockout of one or more genes involved in the SPI-1 pathway. These genes include, but are not limited to, one more of: avrA, hilA, hilD, invA, invB, invC, invE, invF, invG, invH, invI, invJ, iacP, iagB, spaO, spaP, spaQ, spaR, spaS, orgA, orgB, orgC, prgH, prgI, prgJ, prgK, sicA, sicP, sipA, sipB, sipC, sipD, sirC, sopB, sopD, sopE, sopE2, sprB, and sptP. Additionally or alternatively, the immunostimulatory bacteria can contain knockouts or deletions in genes to inactivate products involved in SPI-1-independent infection/invasion, such as one or more of the genes fljB, fliC, rck, pagN, hlyE, pefI, srgD, srgA, srgB, and srgC, and/or the immunostimulatory bacteria can contain knockouts or deletions to inactivate products of genes that induce cell death of tumor-resident immune cells, such as genes that encode proteins that are directly recognized by the inflammasome, including fljB, fliC, prgI (needle protein), and prgJ (rod protein). The rck gene is desirable because it protects the bacteria against inactivation by complement. Bacteria that do not endogenously encode rck, can be modified to encode a heterologous rck gene.

[0938] The immunostimulatory bacteria are derived from suitable bacterial strains. Bacterial strains can be attenuated strains, or strains that are attenuated by standard methods, or that, by virtue of the modifications provided herein, are attenuated in that their ability to colonize is limited primarily to immunoprivileged tissues and organs, particularly tumor-resident immune cells, the TME, and tumor cells, including solid tumors. Bacteria include, but are not limited to, for example, strains of Salmonella, Shigella, Listeria, E. coli, and Bifidobacteriae. For example, species include Shigella sonnei, Shigella flexneri, Shigella dysenteriae, Listeria monocytogenes, Salmonella typhi, Salmonella typhimurium, Salmonella gallinarum, and Salmonella enteritidis. Other suitable bacterial species include Rickettsia, Klebsiella, Bordetella, Neisseria, Aeromonas, Francisella, Corynebacterium, Citrobacter, Chlamydia, Haemophilus, Brucella, Mycobacterium, Mycoplasma, Legionella, Rhodococcus, Pseudomonas, Helicobacter, Vibrio, Bacillus, and Erysipelothrix. For example, Rickettsia rickettsii, Rickettsia prowazekii, Rickettsia tsutsugamuchi, Rickettsia mooseri, Rickettsia sibirica, Bordetella bronchiseptica, Neisseria meningitidis, Neisseria gonorrhoeae, Aeromonas eucrenophila, Aeromonas salmonicida, Francisella tularensis, Corynebacterium pseudotuberculosis, Citrobacter freundii, Chlamydia pneumoniae, Haemophilus somnus, Brucella abortus, Mycobacterium intracellulare, Legionella pneumophila, Rhodococcus equi, Pseudomonas aeruginosa, Helicobacter mustelae, Vibrio cholerae, Bacillus subtilis, Erysipelothrix rhusiopathiae, Yersinia enterocolitica, Rochalimaea quintana, and Agrobacterium tumerfacium.

[0939] Exemplary of the immunostimulatory bacteria provided herein are species of Salmonella. Exemplary of bacteria for modification as described herein are wild-type strains of Salmonella, such as the strain that has all of the identifying characteristics of the strain deposited in the American Type Culture Collection (ATCC) as accession #14028. Engineered strains of Salmonella typhimurium, such as strain YS1646 (ATCC catalog #202165, also referred to as VNP20009; see, also International PCT Application Publication No. WO 99/13053), is engineered with plasmids to complement an asd gene knockout and to allow for antibiotic-free plasmid maintenance. The strains then are modified to delete the flagellin genes, and/or to delete pagP. The combination of flagella knockout and pagP deletion renders the strains highly resistant to human serum complement. The strains also are rendered auxotrophic for purines, particularly adenosine, and are asd⁻ and msbB⁻. As exemplified, strains in which the purI and msbB genes are completely deleted are more fit (e.g., grow faster) that strain VNP20009, in which these genes are not deleted, but are modified to eliminate expression. The asd gene can be provided on a plasmid for in vivo replication in the eukaryotic host. The strains also have a modification, such as a deletion, disruption, or other modification, in the ansB gene, preventing them from producing immunosuppressive L-asparaginase IL, and improving tumor T-cell function. The strains also are modified to eliminate biofilm production, such as by a csgD deletion, which renders them unable to produce curli fimbriae, cellulose, and c-di-GMP, reducing unwanted inflammatory responses, and preventing the strains from forming biofilms.

[0940] These genomic deletions and plasmids are described and exemplified elsewhere herein. Any of the nucleic acid encoding therapeutic products, such as immunostimulatory proteins and other products, described elsewhere herein and/or known to those of skill in the art, can be included on the plasmid. The plasmid generally is present in low to medium copy number, as described elsewhere herein. Therapeutic products include gain-of-function mutants of cytosolic DNA/RNA sensors, that can constitutively evoke/induce type I IFN expression, and other immunostimulatory proteins, such as cytokines, chemokines, and co-stimulatory molecules, that promote an anti-tumor immune response in the tumor microenvironment, and other such products described herein. The plasmids also can encode antibodies, and fragments thereof, e.g., single-chain antibodies that target immune checkpoints and other cancer targets, such as VEGF, IL-6, and TGF-β, and other molecules, such as bispecific T-cell engagers, or BiTEs®. The plasmids also can encode IL-6 binding decoy receptors, TGF-beta binding decoy receptors, and TGF-beta polypeptide antagonists.

9. Robust Immunostimulatory Bacteria Whose Genomes are Optimized for Anti-Tumor Therapy, and that Encode Therapeutic Products, Including a Plurality Thereof

[0941] As described herein, bacterial strains, such as S. typhimurium strains, that are engineered to be adenosine auxotrophic, and are reduced in their ability to induce pro-inflammatory cytokines by modification of the LPS and/or deletion of flagellin, and/or are modified by deletion or elimination of L-asparaginase II expression to improve T-cell function, and/or are modified by deletion or disruption of genes required for biofilm formation, and/or that demonstrate enhanced human serum survival due to increased rck expression, are further modified to deliver therapeutic products, such as immunomodulatory proteins, and promote robust anti-tumor immune responses.

[0942] The table below summarizes the bacterial genotypes/modifications, with reference to Salmonella genes with the understanding that counterpart genes can be modified in other bacterial species, their functional effects, and some of the effects/benefits achieved herein.

| Genotype/ | | |
|---|---|---|
| Modification | Functional Effect | Effect/Benefit |
| Δasd (in | Plasmid | Improves plasmid delivery |
| genome) | maintenance | Plasmid maintenance in vivo via asd |
| | | cassette on plasmid |
| ΔpurI | Purine/adenosine | Tumor-specific enrichment |
| | auxotrophy | Limited replication in healthy tissue |
| ΔmsbB | LPS surface coat | Decreases TLR4 recognition |
| | modification | Reduces immunosuppressive cytokine |
| | | profile (TNF-α) |
| | | Improves safety |
| | | Prevents intracellular replication |
| ΔfliC/ΔfljB | Flagella knockout | Removes major inflammatory and |
| (ΔFLG) | | immune-suppressive element-lethal |
| | | inflammasome activation |
| | | Eliminates TLR5 recognition |
| | | Reduces immunosuppressive cytokine |
| | | profile, including suppression of type I |
| | | IFN |
| | | Improves safety |
| | | Reduces ability to invade non- |
| | | phagocytic cells (e.g., stromal and |
| | | tumor cells) |
| ΔpagP | LPS surface coat | Removes major inflammatory and |
| | modification | immunosuppressive element, |
| | | including suppression of type I IFN |
| | | Decreases TLR4 recognition |
| | | Reduces IL-6 production |
| | | Improves safety |
| ΔansB | L-asparaginase II | Enhances tumor T-cell function |
| | knockout | |
| ΔcsgD | Removes curli | Reduces inflammation, including IL- |
| | fimbriae, cellulose | 10 suppression of type I IFN, |
| | production, c-di- | Prevents possible biofilm formation |
| | GMP | Enhances phagocytic cell uptake |
| Plasmid | Expresses gene | Eukaryotic promoter limits expression |
| | products under | to cells containing the plasmid |
| | control of host- | Long term expression in the TME |
| | recognized | (i.e., asd encoded on plasmid under |
| | promoter | control of host-recognized promoter) |
| | | Expression of any combination of |
| | | therapeutic product(s) with large |
| | | capacity |

[0943] As shown in the examples, immunostimulatory bacteria that comprise these genome modifications, such as the alterations to the bacterial surface coat, and others of these changes result in a reduction of TLR-mediated inflammatory cytokines, such as reduction in or elimination of induced levels of IL-10. It is shown herein that these bacteria are consumed by immune cells, and can deliver encoded payloads, such as immunostimulatory protein(s). These bacteria target (or a taken up by) phagocytic tumor-resident myeloid cells, such as CD45+ cells, tumor associated macrophages (TAMS), and dendritic cells.

10. Vaccines and Bacteria that Deliver RNA, Including mRNA and Other Forms of RNA, for Expression in a Eukaryotic Host

### Immunostimulatory Bacteria as Delivery Vehicles for RNA

[0944] Provided are immunostimulatory bacteria that contain or that express encoded heterologous RNA, where the bacteria infect eukaryotic host cells, and release the encoded RNA into the cytoplasm of the host cell (see, e.g., U.S. Pat. No. 7,390,646). The RNA can be a therapeutic product, or the RNA is translated by the host cell machinery into a therapeutic product. Such products include immunostimulatory proteins and antigens from pathogens and/or tumor antigens that can be expressed in cells, such as phagocytic cell for presentation to induce immune responses including T-cell responses, memory T-cells, and antibodies. For immunization, the bacteria can be administered to the site or by a route that is the same as naturally-occurring route of the pathogen, such as by inhalation or nasal administration for respiratory viruses, oral administration for gastric and enteric pathogens, intramuscular administration, such as for viruses, and also systemic routes. This can result in in situ immune responses that can provide lifelong immunity.

[0945] Any of the immunostimulatory bacteria provided herein can be modified so that the bacteria produce the exogenous or heterologous RNA within the bacterial cells in vitro, such as during in vitro cell culture, or after entry of the bacterial cells into the host eukaryotic cells, or both during in vitro cell culture, and after entry of the bacterial cells into the host eukaryotic cells. Following infection of eukaryotic host cells, the bacteria release the exogenous RNA into the cytoplasm of the host cells. The RNA can be encoded on a plasmid in the bacteria, and can encode a plurality of therapeutic products. In particular, the forms of RNA delivered are any that can be translated by eukaryotic cell machinery. This includes mRNA, long non-coding RNA, RNAi, dsRNA, circular RNA (eRNA; see, e.g., U.S. Pat. No. 10,953,033).

[0946] Provided are immunostimulatory bacteria and genomically-modified bacteria that contain or express encoded heterologous RNA, where, when the bacteria infect eukaryotic host cells, the encoded RNA, such as mRNA, is released into the cytoplasm of the host cell. The bacteria include any of the immunostimulatory bacteria provided herein, and particularly, those that include genomic modifications, so that they have reduced TLR2, TLR4, and TLR5 signaling. The bacteria also can encode a therapeutic product or a plurality thereof, and particularly, encode immunostimulatory proteins, including cytokines and STING proteins, including the modified STING proteins provided herein, which can act as adjuvants if the RNA is encoding an antigen or protein for vaccination, or for a treatment for which immune stimulation is advantageous.

[0947] The nucleic acid encoding the RNA is modified so that it is transcribed in the bacteria, but is not translated. This can be effected by designing the nucleic acid so that the transcribed RNA product is not recognized by or cannot be translated by prokaryotic ribosomes. The encoding nucleic acid further is designed such that the transcript is recognized by and is translated by eukaryotic ribosomes, such as those present in a host, such as a human. This can be effected by, for example, including nucleic acid encoding an internal ribosome entry site (IRES) that is not recognized by prokaryotic ribosomes, but is recognized by eukaryotic ribosomes The encoded RNA typically is mRNA, but can be other forms of RNA that can be translated into therapeutic products or immunizing antigens or proteins. Other forms, of RNA include, but are not limited to, eRNA, which is circular RNA. eRNA is a circular polyribonucleotide that: (a) contains an expression sequence encoding a polypeptide, such as an antigen; (b) contains an internal ribosome entry site (IRES) that is not recognized by prokaryotic ribosomes, and a termination element; and (c) lacks a poly-A sequence, a free 3′ end, and an RNA polymerase recognition motif (see, e.g., U.S. Pat. No. 10,953,033, which describes such circular RNA). The bacteria are modified so that the transcribed RNA is circularized in vivo.

[0948] The RNA can be a therapeutic product, or the RNA is translated by the host cell machinery into a therapeutic product. The RNA can encode an antigen, whereby it is encoded into a protein when delivered into the host cells, to immunize the host against the antigen, and the pathogen or the tumor from which the antigen is derived. The nucleic acid can be modified so that the encoded antigen is modified to improve its properties for immunization, such as by stabilizing a conformation of the antigen against which antibodies and other adaptive immune responses are directed. This has been done, for example, for the spike proteins, on corona viruses, so that the conformation that binds to host cell receptors is stabilized, resulting in a more robust antibody response.

[0949] Any of the immunostimulatory bacteria provided herein can be modified so that the bacteria produce the exogenous or heterologous RNA within the bacterial cells in vitro, such as during in vitro cell culture, or after entry of the bacterial cells into the host eukaryotic cells, or both during in vitro cell culture and after entry of the bacterial cells into the host eukaryotic cells. Following infection of eukaryotic host cells, the bacteria release the exogenous RNA into the cytoplasm of the host cells. The RNA can be encoded on a plasmid in the bacteria, and can encode a plurality of therapeutic products.

[0950] The nucleic acid encoding the RNA is operably linked to a promoter recognized by the bacteria, or the bacteria are modified to encode the RNA polymerase that recognizes the promoter, such as a bacterial promoter, or a bacteriophage promoter that is recognized by phage T7 RNA polymerase. The RNA can be mRNA, or other RNA molecules that contain regulatory sequences for expression in a eukaryotic host cell. The promoter can be an inducible promoter. The bacteria can contain a plurality of copies of the encoded RNA, which, when introduced into a eukaryotic host, such as a human, is released into the host cell cytoplasm, where, if it is mRNA, it can be translated. Bacterial transcription is decoupled from bacterial translation, so that gene products are transcribed, but not translated. In some embodiments, rather than including an IRES sequence, the nucleic acid encoding the RNA lacks a Shine-Dalgarno (SD) sequence upstream of the start codon, whereby the RNA cannot be translated by bacterial or archaeal ribosomes, but can be translated by eukaryotic ribosomes. The RNA can contain sequences, such as a Kozak sequence, with a start codon recognized by eukaryotic ribosomes. Shine-Dalgarno sequences include, for example aggagg (SEQ ID NO:389), agga (SEQ ID NO:390), gagg (SEQ ID NO:391), and ggag (SEQ ID NO:392):

⁽¹⁾
. . . AUAA [symbol] UAAAUA [symbol]
⁽²⁾
. . . AUAA [symbol] AAUAAAUA [symbol]
⁽³⁾
. . . AUAACA [symbol] UAAAUA [symbol]
⁽⁴⁾
. . . AUAACA [symbol] UAAAUA [symbol]
Shine-Dalgarno star co

(see, e.g., parts.igem.org/File:RBSAlignedSpacing.png). The RNA also can contain one or more Internal Ribosome Entry Site(s) (IRES), which block or inhibit translation by prokaryotic ribosomes. Thus, the RNA is produced in the bacteria, which infect or have infected myeloid cells, thereby delivering RNA to the myeloid cells, where, if it is mRNA, it is translated in the myeloid cells, which recognize the RNA for translation because of the Shine-Dalgarno sequence, or IRES, or other such regulatory sequence. Inserting, for example, an IRES between a promoter and a gene sequence, de-couples transcription from translation. The immunostimulatory bacteria, thus, serve as an RNA delivery system.

[0951] In embodiments, bacterial systems, such as the immunostimulatory bacteria provided herein, are used to deliver genetic payloads to tissue-resident and/or tumor-resident myeloid cells. In this context, the bacteria are dosed in vivo; the bacteria are, for example, asd⁻, and do not include a plasmid containing a complementing asd gene cassette, so that they cannot replicate in vivo. To grow the bacteria, they are cultured in vitro; diaminopimelic acid (DAP) is added to the culture medium to facilitate bacterial replication in the absence of a functional asd gene. In this context, when such immunostimulatory bacteria are administered, one bolus of nucleic acid is delivered to tissue-resident or tumor resident myeloid cells. After phagocytosis and intracellular destruction of the bacteria, the RNA encoding the therapeutic product(s) is released into the cytoplasm of the myeloid cells for translation, to produce the therapeutic product(s) that is/are secreted from the myeloid cells into the surrounding environment, such as the tumor microenvironment, when the infected cells are tumor-resident myeloid cells.

[0952] Bacteria cultured in vitro encode RNA, but lack the signals/regulatory sequences, such as the Shine-Dalgarno sequence, that are required to translate the RNA, or the encoding nucleic acid contains sequences, such as an IRES, that blocks or does not provide for translation by prokaryotic ribosomes, but that are recognized by eukaryotic ribosomes, so that the bacteria produce, but do not translate, the mRNA. The bacteria, which are modified as described herein, so that they infect or accumulate in tissue-resident or tumor-resident immune cells, particularly tissue-resident or tumor-resident myeloid cells, deliver the RNA to the myeloid cells, where it is translated. Any RNA can be delivered, including RNA encoding antigens, such as from pathogens or tumors, and/or encoding anti-viral therapeutics, which are expressed under control of a prokaryotic promoter. For such applications, the plasmids can be present in higher copy number (e.g., 150 copies or greater, such as 200, 300, 400, 500, or more copies, such as 500-700 copies), so that large amounts of the RNA is produced and delivered to the myeloid cells.

[0953] Also, as described and exemplified herein and discussed above, the encoding and regulatory sequences can be prepared so that the RNA is produced in the bacterium, but the encoding nucleic acid includes regulatory sequences that inhibit or prevent translation by bacterial ribosomes, but that are recognized by, and/or enhance, promote, or permit translation by, eukaryotic host ribosomes. For example, the mRNA is transcribed under control of a prokaryotic promoter. An IRES sequence is included in the transcript, which blocks translation in the prokaryotic bacterium, but, when delivered into a eukaryotic host cell, permits translation by eukaryotic ribosomes. The bacteria, thus, provide non-labile mRNA delivery systems. The bacteria can be grown in large quantities, and then can be lyophilized or frozen and/or stored at room temperature. They can be formulated into tablets, or powders, or can be micronized for inhalation.

[0954] The bacteria include those that contain genome modifications, whereby the response by toll-like receptors (TLRs) 2, 4, and 5 is reduced, compared to the bacterium without the genome modifications. These bacteria optionally can additionally contain genomic modifications so that they are auxotrophic for a required nutrient or factor, so that they are unable to replicate in a eukaryotic host, but can replicate in vitro when supplied with the nutrient or factor. These include deficiencies in adenosine biosynthesis, which has the added advantage of reducing immunosuppression when used for treatment of subjects with cancer who have tumors and a tumor microenvironment in which adenosine accumulates. Other deficiencies include thymine synthesis deficiencies, such as thyA⁻, described and discussed in sections above, and exemplified below.

[0955] The bacteria contain a plasmid containing nucleic acid encoding a product, or comprise RNA encoding the product. The plasmid can be present in low, medium, or high copy number. When used to deliver RNA, the plasmid can be present in high copy number, such as 150 copies or greater. The product encoded by the nucleic acid or RNA is an antigenic sequence or sequences from a pathogenic virus, bacterium, parasite, or is a tumor antigen, whereby, upon expression of the encoded antigen in the host, the host develops an immune-protective response or immunizing response against the pathogenic virus, bacterium, or parasite, or against the tumor antigen, or the product is a therapeutic product to be delivered to the host. Expression of the antigenic sequence(s) is/are under control of a prokaryotic promoter, so that RNA encoding the antigen(s) is produced in the bacterium, and, for RNA delivery, nucleic acid encoding the antigen comprises regulatory sequences that inhibit or prevent translation of encoded RNA by bacterial ribosomes, but that do not inhibit or prevent translation of the encoded RNA by eukaryotic host ribosomes, whereby translation is de-coupled from transcription in the bacterium. By virtue of the genomic modifications, the resulting bacterium is selective for infecting phagocytic cells when administered to a eukaryotic subject, and delivers the nucleic acid into the phagocytic cells, wherein the RNA is translated.

[0956] Of particular interest are the immunostimulatory bacteria provided herein that are modified so that they infect phagocytic cells, such as macrophages. In particular, the bacteria, which can be any suitable species/genus, such as Salmonella, Listeria, and E. coli, are so-modified so that they are one or more or all of modified to produce LPS with penta-acylated lipid A, modified to lack flagella, and modified to lack curli fimbriae; for example, the bacteria are msbB⁻/pagP⁻, flagellin⁻, and csgD⁻ (by modification by each of the encoding genes or equivalent genes in a particular species, so that the products are not produced, or, if produced, are inactive). The bacteria also are modified, such as by rendering them asd⁻, so that the can be grown in vitro by providing the appropriate nutrient, such a DAP, but so that they do not replicate in a eukaryotic host, and ultimately die when the mRNA is delivered into the eukaryotic cells. The bacteria also can encode additional payloads, as described herein, such as modified STING proteins and/or cytokines (all as described and listed elsewhere herein), which serve to stimulate the host immune system, thereby acting as adjuvants. Such products can be encoded on plasmids in the bacterium, and can be encoded on a polycistronic construct with the mRNA encoding the antigen, and/or can be encoded under control of a eukaryotic promoter for transcription/translation into proteins, as described throughout the disclosure herein. These proteins can be designed for transcription, or, as appropriate, can be modified so that they are membrane anchored for presentations. The immunostimulatory bacteria, such as E. coli, can be modified so that they encoded and express rck to increase resistance to complement.

11. Bacterial Vaccines Against Particular Antigens, Including from Pathogens, and also Antigens from Tumors, for use as Anti-Pathogen Treatments and Vaccines, and For Anti-Cancer Treatment and/or Prevention

[0957] Vaccines can be used for preventing (reducing the risk) of contracting a disease or developing a disorder or cancer or as treatments for diseases, disorders, or cancers, and combinations thereof. Immunostimulatory bacteria provided herein and other vaccines can be used for these purposes.

[0958] Because of the similarity in the immune response between an anti-tumor response and an anti-viral response, the immunostimulatory bacteria provided herein also can be used to treat infectious diseases. The bacteria can encode an anti-viral or anti-bacterial therapeutic, such as an inhibitor of a viral or bacterial product, or an inhibitor of the expression of a viral or bacterial product, or a viral or bacterial antigen. The combination of the immune response from the immunostimulatory bacteria and the therapeutic anti-pathogen product, and also, to the immunostimulatory proteins and encoded immune-stimulating proteins, provides a therapeutic immunostimulatory bacterium for vaccinating against and/or treating infectious diseases, particularly diseases associated with viral infections, such as chronic viral infections and latent viral infections. Of interest are chronic viral infections, such as infections by hepatitis viruses, herpesviruses, varicella zoster virus (VZV), Epstein-Barr virus, human immunodeficiency virus (HIV), human T-cell leukemia virus (HTLV), Respiratory Syncytial Virus (RSV), measles virus, and other such viruses that chronically infect subjects. The immunostimulatory bacteria also can be used for the treatment of acute infections as well, such as initial infections with chronic influenza and coronaviruses, such as Severe Acute Respiratory Syndrome coronavirus (SARS-CoV), Middle East Respiratory Syndrome coronavirus (MERS-CoV), and Severe Acute Respiratory Syndrome coronavirus 2 (SARS-CoV-2, which causes COVID-19). The immunostimulatory bacteria can encode an antigen from a pathogen, such as a viral antigen, and are used as a vaccine to prevent infection or to treat existing infections. The immunostimulatory bacterium, by virtue of its ability to accumulate in immune cells, such as antigen-presenting cells, such as T-cells, can promote a T-cell response to the virus. For example, immunostimulatory bacteria provided herein are deficient in asparaginase IL, which enhances the function of T-cells to thereby promote the anti-viral response. The combination of expression of a viral antigen, such as an antigen from an essential viral protein, such as, for example, in the case of a coronavirus, an antigen from the Nucleocapsid, M and/or S proteins, which can result in neutralizing antibodies, and the enhancement of long-lived circulating and tissue-resident CD8⁺ T-cells, and provides effective vaccines and treatments.

[0959] The efficacy of existing vaccines, such as inactivated or attenuated vaccines, such as the Bacillus Calmette-Guérin (BCG) vaccine for tuberculosis (TB), can be improved by modifying the genome so that asparaginase is not expressed, thereby eliminating the immune suppression. BCG vaccine effectiveness is often reduced. This is by virtue of the asparaginase secreted by the vaccine bacteria, which decreases T-cell activity, thereby having an immuno-suppressive effect. This can be mitigated by modifying the bacteria to reduce or eliminate asparaginase activity. As discussed elsewhere herein, other modifications that reduce or eliminate TLR2 or TLR2/4/5 responses to the bacteria eliminate any blockade or inhibition of type I IFN by the activity or response of TLR2, or TLR4, or TLR5, or other toll-like receptors to bacteria. As described herein, the responses of the TLRs to bacteria can block or inhibit type I IFN; modifications of the bacteria herein by eliminating responses of these TLRs eliminate this undesirable effect.

[0960] As discussed in the section above, the immunostimulatory bacteria can encode an anti-viral therapeutic or an anti-bacterial therapeutic, or an antigen for immunization. Such therapeutics include inhibitors of viral genes and proteins, such as proteins required for replication and/or packaging, or the immunostimulatory bacteria can encode a therapeutic that prevents binding or interaction of a virus with a receptor or receptors that facilitate or provide for viral entry into a target cell. In some embodiments, the therapeutic protein can be under the control of a prokaryotic promoter. As discussed in the section above, the bacteria can be those that deliver RNA.

[0961] As discussed above, the bacteria can be used to deliver RNA, including mRNA for vaccination against pathogens, such as SARS-CoV, SARS-CoV-2, influenza, and other pathogens, and also, for anti-tumor therapy. The bacteria can also encode immunostimulants or other immune system enhancers, or inhibitors of immunosuppressors, such as immune checkpoint proteins. Exemplary of these are STING proteins, including the modified STING proteins provided herein, cytokines, and other such immune stimulating proteins. Any of the payloads described herein, including the combined payloads, that are for treating tumors, also can be encoded/delivered by the bacteria. Anti-tumor responses and anti-viral responses are similar. For the vaccines, the immunostimulatory payloads serve as adjuvants to enhance the immune response. The pathogen antigen-encoding nucleic acid is under control of a prokaryotic promoter; the other payloads also can be provided as a polycistronic construct with the pathogen antigen-encoding nucleic acid, or they can be encoded under control of a eukaryotic promoter, as described herein for the anti-tumor therapeutics.

[0962] Bacteria, such as those provided herein, that deliver payloads to phagocytic cells, and that contain the various genome modifications that improve their properties for delivery, can be used to deliver RNA. The bacteria are superior vehicles to nanoparticles and other such delivery vehicles, since the RNA is delivered in the bacterial cytoplasm and contains the adjuvants to stimulate type I IFN. Among the advantages of the bacteria provided herein for delivery of RNA are: 1) they allow for RNA delivery “without the RNA”—the bacterial delivery vehicle obviates the need for complex RNA stability/manufacturing; 2) they result in direct targeting of phagocytic antigen presenting-cells (APCs); 3) they allow for the inclusion of payloads that provide type I IFN adjuvant activity; 4) they contain genome modification so that the bacteria do not replicate in the eukaryotic (such as human) host, such as by rendering the bacteria asd⁻ by inactivating endogenous asd activity and not encoding it on the plasmid; and 5) removal of bacterial products that are poor adjuvants by genome modification is possible, such as by eliminating the flagella, modifying the LPS, reducing or eliminating biofilm formation, as well as the elimination of asparaginase II activity. Exemplary of these bacteria are those that are msbB⁻/pagP⁻, and flagellin⁻, and optionally, ansB⁻, and csgD⁻, with a complete (clean) deletion of the purI gene. Bacteria as vehicles also permit rapid engineering and deployment; bacteria are easily scalable and are easy to manufacture; a plurality of different RNAs can be encoded in a single bacterium; and bacteria are stable, and they can be stored at room temperature, they can be lyophilized, and they can be formulated for intranasal delivery or delivery by inhalation, as well as for intravenous delivery, and can be formulated for other suitable routes of delivery. Retaining some of the TLR2 activity renders endothelial vascular cells leaky, as does including the genome modification that renders the bacteria csgD⁻.

[0963] For delivery of anti-cancer therapeutic products to the tumor/tumor microenvironment, the encoded products can be operatively linked to trafficking signals, such as signals for secretion. The products also can be designed for expression on a cell surface, such as the cell surfaces of tumor-resident myeloid cells and other phagocytic cells. The gene products can be modified so that they are membrane anchored. For example, IL-12 has been modified herein so that it is membrane-anchored by adding a transmembrane domain to the C-terminus. Other proteins, including, for example, IL-2, IL-12, IL-12p35, IL-21, IL-15, and FLT-3L, can be similarly modified by adding a transmembrane domain or other such anchoring domain, such as a GPI anchor. Anchoring such proteins to the membranes of cells that are infected with the bacteria reduces toxicity so that they are not systemically secreted, but act in the tumor microenvironment. In particular, the immunostimulatory bacteria that encode such products and combinations thereof are those with genome modifications, such as, for example, modifications that result in the bacteria being msbB⁻/pagP⁻ and not having flagella, whereby the response by toll-like receptors (TLRs) 2, 4, and 5 is reduced, compared to the bacteria without the genome modifications.

12. Conversion of M2 Phenotype Macrophages into M1 and M1-Like Phenotype Macrophages

[0964] As described herein, the immunostimulatory bacteria provided herein accumulate in and/or target macrophages. Macrophages are phagocytic immune cells; they play a role in clearing senescent and apoptotic cells, as well as in the phagocytosis of immune-related complexes and pathogens, and in the maintenance of homeostasis. The phenotype and function of macrophages can be polarized by the microenvironment. There are two types: M1-type (classically activated) macrophages, and M2-type (alternatively activated) macrophages.

[0965] The role of M1 macrophages is to secrete pro-inflammatory cytokines and chemokines, and to present antigens, and thus, to participate in the positive immune response, and function as immune monitors. M1 macrophages produce pro-inflammatory cytokines, including IL-6, IL-12, and TNF-alpha. M2 macrophages secrete arginase 1, IL-10, TGF-β, and other anti-inflammatory cytokines, which have the function of reducing inflammation, and contributing to tumor growth and immunosuppressive function.

[0966] As described elsewhere herein, conversion of the macrophages, whatever their initial phenotype, into a hybrid M1/M2 phenotype results in macrophages with an anti-tumor phenotype, and can convert cold (or immune desert) tumors into hot tumors that are susceptible to treatment, such as immunotherapy. M1 macrophage phenotypic markers include CD80 (also known as B7, B7.1, or BB1), CD86 (also known as B7.2), CD64 (also known as high affinity immunoglobulin gamma Fc receptor I), CD16, and CD32 (also known as low affinity immunoglobulin gamma Fc region receptor IIb). Expression of nitric oxide synthase (iNOS) in M1 macrophages can also serve as a phenotypic marker. CD163 and CD206 are markers for the identification of M2 macrophages. Arginase 1 (Arg1) and Dectin-1 also are phenotypic indicators for the identification of M2 macrophages. The phenotypic conversion can be monitored or assessed by virtue of expression of these markers, and/or other markers that are characteristic of such macrophage phenotypes.

[0967] Tumor-associated macrophages (TAMs) are associated with an immunosuppressive M2 phenotype. Immunostimulatory bacteria and other therapeutics provided herein can convert such macrophages into macrophages that have an anti-tumor phenotype. For example, immunostimulatory bacteria provided herein, that encode a therapeutic product that leads to expression of type I interferon (IFN), can effect such conversion. This property unique to the immunostimulatory bacteria, and other therapeutics by virtue of identification of the phenotype, provided herein, exploits the ability of the bacteria that include genomic modifications that result in the infection of macrophages. The encoded therapeutic products include those that are part of a cytosolic DNA/RNA sensor pathway, such as the STING variants (described in detail herein). The ability to convert macrophage phenotypes is demonstrated and exemplified in the Examples below. The expression of a modified STING protein by immunostimulatory bacteria provided herein that infect macrophages and express the STING protein, converts the phenotype of M2 macrophages into an anti-tumor phenotype.

[0968] Immunostimulatory bacteria provided herein, that include genome modifications as described herein, such as the elimination of flagella and LPS modification, convert infected M2 macrophages into those that induce some or all of the cytokine profiles that are anti-tumor. Immunostimulatory bacteria that express a variant STING protein that results in constitutive type I IFN expression in human primary M2 macrophages can convert them into macrophage that are susceptible to anti-cancer treatment, such as immunotherapy.

### D. Immunostimulatory Bacteria with Enhanced Therapeutic Index Encoding Genetic Payloads that Stimulate the Immune Response in the Tumor Microenvironment

[0969] The immunostimulatory bacteria provided herein are modified so that they accumulate in the tumor microenvironment, and in tumor-resident myeloid cells, where encoded therapeutic products, under the control of eukaryotic promoters, are expressed. The bacteria encode therapeutic products, particularly anti-cancer products, including products that stimulate the immune system, and/or that reverse or mitigate the immunosuppressive effects of tumors. As described herein, the bacteria can encode a plurality of products, where expression of each product is under the control of a separate promoter, or expression of the products is under the control of one promotor, and the expression cassette can include sequences that result in expression of the discrete products, and, where appropriate, includes regulatory sequences to ensure secretion of the encoded products into the tumor microenvironment. The immunostimulatory bacteria express encoded therapeutic products on the plasmid. As discussed herein, the plasmid can encode one product, or a plurality thereof. Each product can be expressed under the control of a different eukaryotic promoter, or multiple encoded products can be expressed under the control of a single promoter, such as by including 2A self-cleaving peptides between the coding portions, such as T2A (SEQ ID NO:327), P2A (SEQ ID NO:328), E2A (SEQ ID NO:329), and F2A (SEQ ID NO:330). The encoded products include those described herein, and they can be anti-cancer immune stimulating products whose activities are complementary. The immunostimulatory bacteria provided herein permit the combinatorial administration of multiple immunomodulatory products or payloads (multiplexed payloads) that would otherwise be too toxic if systemically administered. Exemplary of multiplexed payloads include one or more cytokine(s), an immunostimulatory protein to stimulate or induce expression of type I IFN, such as STING or a variant thereof that has increased activity or that is constitutively active, and a co-stimulatory molecule, such as an engineered 4-1BBL co-stimulatory molecule.

[0970] The immunostimulatory bacteria provided herein have strong anti-tumor effects, including provision of cures, such as after IV dosing with the multiplexed payloads or single agent payloads. The immunostimulatory bacteria, when systemically administered, infiltrate and enrich in solid tumors, in the TME, and in tumor-resident myeloid cells, in which the encoded therapeutic products are expressed and then locally delivered to the tumor microenvironment. Upon consumption (phagocytosis) by tumor-resident myeloid cells, the bacteria deliver a genetic payload-encoding plasmid, which allows for ectopic, single or multiplexed payload expression in a tumor-specific manner.

### 1. Immunostimulatory Proteins

[0971] The immunostimulatory bacteria herein can be modified to encode one or more of an immunostimulatory protein that promotes, induces, or enhances an anti-tumor response. As exemplified and described herein, the order in which the encoding nucleic acids are arranged on the plasmid can improve overall expression, and modifications to the plasmids, such as complete deletions or inactivation of genes, can improve the fitness of the bacteria that contain the plasmids encoding the proteins. The immunostimulatory protein(s) can be encoded on a plasmid in the bacterium, under the control of a eukaryotic promoter, such as a promoter recognized by RNA polymerase II, for expression in a eukaryotic subject, particularly the subject for whom the immunostimulatory bacterium is to be administered, such as a human. The nucleic acid encoding the immunostimulatory protein(s) can include, in addition to the eukaryotic promoter, other regulatory signals for expression or trafficking in the cells, such as for secretion or expression on the surface of a cell.

[0972] Immunostimulatory proteins are those that, in the appropriate environment, such as a tumor microenvironment (TME), can promote, or participate in, or enhance, an anti-tumor response by the subject to whom the immunostimulatory bacterium is administered. Immunostimulatory proteins include, but are not limited to, cytokines, chemokines, and co-stimulatory molecules. These include cytokines, such as, but not limited to, IL-2, IL-7, IL-12, IL-15, IL-18, IL-21, IL-23, IL-12p70 (IL-12p40+IL-12p35), IL-15/IL-15R alpha chain complex, IL-36γ, GM-CSF, IFNα, IFNβ, IL-2 that has attenuated binding to IL-2Ra, and IL-2 that is modified so that it does not bind to IL-2Ra; chemokines, such as, but not limited to, CCL3, CCL4, CCL5, CXCL9, CXCL10, and CXCL11; and/or co-stimulatory molecules, such as, but not limited to, CD40, CD40L, OX40, OX40L, 4-1BB, 4-1BBL, 4-1BBL with the cytoplasmic domain truncated or deleted (4-1BBLΔCyt), members of the TNF/TNFR superfamily (e.g., CD27 and CD27L), and members of the B7-CD28 family (e.g., CD80, CD86, ICOS, and ICOS ligand (B7RP1)).

[0973] Other such immunostimulatory proteins, that are used for the treatment of tumors, or that can promote, enhance or otherwise increase or evoke an anti-tumor response, that are known to those of skill in the art, are contemplated for encoding in the immunostimulatory bacteria provided herein. For example, the immunostimulatory bacteria can deliver a genetic payload encoding a truncated co-stimulatory molecule (e.g., 4-1BBL, CD80, CD86, CD27L, B7RP1, and OX40L), with a full or partial cytoplasmic domain deletion, for expression on an APC, where the truncated gene product is capable of constitutive immuno-stimulatory signaling to a T-cell through co-stimulatory receptor engagement, and is unable to counter-regulatory signal to the APC due to a deleted or truncated cytoplasmic domain. As described elsewhere herein, the modified truncated cytoplasmic domain, for example, of 4-1BBL, contains particular residues to ensure proper orientation of the protein domains, which increases expression of the protein. Deletion (full or partial), and modification, of the cytoplasmic domain of co-stimulatory molecules, potentiates the activation of the co-stimulatory molecule, without the immunosuppressive reverse signaling.

a. Cytokines and Chemokines

[0974] In some embodiments, the immunostimulatory bacteria provided herein are engineered to express cytokines to stimulate the immune system, including, but not limited to, for example, IL-2, IL-7, IL-12, IL-12p70 (IL-12p40+IL-12p35), IL-15, the IL-15/IL-15R alpha chain complex (IL-15Rα-IL-15sc), IL-18, IL-21, IL-23, IL-36γ, IL-2 that has attenuated binding to IL-2Ra, IL-2 that is modified so that it does not bind to IL-2Ra, IFN-α, and IFN-β. Cytokines stimulate immune effector cells and stromal cells at the tumor site, and enhance tumor cell recognition by cytotoxic cells. In some embodiments, the immunostimulatory bacteria can be engineered to express chemokines, such as, for example, CCL3, CCL4, CCL5, CXCL9, CXCL10, and CXCL11.

### IL-2

[0975] Interleukin-2 (IL-2), which was the first cytokine approved for the treatment of cancer, is implicated in the activation of the immune system by several mechanisms, including the activation and promotion of cytotoxic T lymphocyte (CTL) growth, the generation of lymphokine-activated killer (LAK) cells, the promotion of regulatory T-cell (Treg cell) growth and proliferation, the stimulation of tumor-infiltrating lymphocytes (TILs), and the promotion of T-cell, B cell, and NK cell proliferation and differentiation. Recombinant IL-2 (rIL-2) is FDA-approved for the treatment of metastatic renal cell carcinoma (RCC) and metastatic melanoma (see, e.g., Sheikhi et al. (2016) Iran J. Immunol. 13(3):148-166).

### IL-7

[0976] IL-7, which is a member of the IL-2 superfamily, is implicated in the survival, proliferation, and homeostasis of T-cells. Mutations in the IL-7 receptor have been shown to result in the loss of T-cells, and the development of severe combined immunodeficiency disease (SCID), highlighting the critical role that IL-7 plays in T-cell development. IL-7 is a homeostatic cytokine that provides continuous signals to resting naïve and memory T-cells, and which accumulates during conditions of lymphopenia, leading to an increase in both T-cell proliferation and T-cell repertoire diversity. In comparison to IL-2, IL-7 is selective for expanding CD8⁺ T-cells over CD4⁺FOXP3⁺ regulatory T-cells. Recombinant IL-7 has been shown to augment antigen-specific T-cell responses following vaccination and adoptive cell therapy in mice. IL-7 also can play a role in promoting T-cell recovery following chemotherapy of hematopoietic stem cell transplantation. Early phase clinical trials on patients with advanced malignancy have shown that recombinant IL-7 is well-tolerated and has limited toxicity at biologically active doses (i.e., in which the numbers of circulating CD4⁺ and CD8⁺ T-cells is increased by 3-4 fold) (see, e.g., Lee, S. and Margolin, K. (2011) Cancers 3:3856-3893). IL-7 has been shown to possess antitumor effects in tumors, such as gliomas, melanomas, lymphomas, leukemia, prostate cancer, and glioblastomas, and the in vivo administration of IL-7 in murine models resulted in decreased cancer cell growth. IL-7 also has been shown to enhance the antitumor effects of IFN-γ in rat glioma tumors, and to induce the production of IL-la, IL-1p, and TNF-α by monocytes, which results in the inhibition of melanoma growth. Additionally, administration of recombinant IL-7 following the treatment of pediatric sarcomas resulted in the promotion of immune recovery (see, e.g., Lin et al. (2017) Anticancer Research 37:963-968).

### IL-12 (IL-12p70 (IL-12p40+IL-12p35))

[0977] Bioactive IL-12 (IL-12p70), which promotes cell-mediated immunity, is a heterodimer, composed of p35 and p40 subunits, whereas IL-12p40 monomers and homodimers act as IL-12 antagonists. IL-12, which is secreted by antigen-presenting cells, promotes the secretion of IFN-γ from NK and T-cells, inhibits tumor angiogenesis, results in the activation and proliferation of NK cells, CD8⁺ T-cells, and CD4⁺ T-cells, enhances the differentiation of naïve CD4⁺ T-cells into Th1 cells, and promotes antibody-dependent cell-mediated cytotoxicity (ADCC) against tumor cells. IL-12 has been shown to exhibit antitumor effects in murine models of melanoma, colon carcinoma, mammary carcinoma, and sarcoma (see, e.g., Kalinski et al. (2001) Blood 97:3466-3469; Sheikhi et al. (2016) Iran J. Immunol. 13(3):148-166; and Lee, S. and Margolin, K. (2011) Cancers 3:3856-3893).

### IL-15 and IL-15:IL-15Rα (IL-15/IL-15Rα)

[0978] IL-15 is structurally similar to IL-2, and while both IL-2 and IL-15 provide early stimulation for the proliferation and activation of T-cells, IL-15 blocks IL-2 induced apoptosis, which is a process that leads to the elimination of stimulated T-cells and the induction of T-cell tolerance, limiting memory T-cell responses, and potentially limiting the therapeutic efficacy of IL-2 alone. IL-15 also supports the persistence of memory CD8⁺ T-cells for maintaining long-term antitumor immunity, and has demonstrated significant antitumor activity in pre-clinical murine models via the direct activation of CD8⁺ effector T-cells in an antigen-independent manner. In addition to CD8⁺ T-cells, IL-15 is responsible for the development, proliferation, and activation of effector natural killer (NK) cells (see, e.g., Lee, S. and Margolin, K. (2011) Cancers 3:3856-3893; and Han et al. (2011) Cytokine 56(3):804-810).

[0979] IL-15/IL-15R alpha chain complex can be used instead of IL-15 because it has longer in vivo stability than monomeric IL-15, is 10- to 100-fold more active on immune cells than IL-15. IL-15/IL-15Rα stimulates the maturation, proliferation and anti-apoptotic maintenance of NK cells, γδ(gamma delta) T-cells and T-cells; and it promotes the survival of activated T-cells (CTLs) and generation of long-lived CD8+CD44^{hi} T-cell memory cells. Clinically, IL-15 is superior to IL-2 as it does not bind IL-2Ralpha, located on immunosuppressive Tregs, and does not induce activation-induced cell death (AICD) or extensive capillary leak syndrome. It is shown herein that there is synergy between the type I interferon, induced by the engineered STING, to enhance CD8+ cell functions. There is synergy to enhance myeloid-mediated T-cell recruitment and CD8+ T-cell function. They act synergistically to activate human dendritic cells (DCs) to induce anti-viral CD8+ T-cell responses to thereby induce anti-cancer immunity. It is shown herein that this combination induces a high cure rate in an animal model. Strong T-cell infiltration in murine orthotopic T-cell excluded tumors, and breakdown of the stromal tumor associated macrophage (TAM) barrier. Significant T-cell and NK recruitment were observed.

[0980] IL-15 and IL-15 receptor alpha (IL-15Rα) are coordinately expressed by antigen-presenting cells, such as monocytes and dendritic cells, and IL-15 is presented in trans by IL-15Rα to the IL-15Rβγ_{C} receptor complex expressed on the surfaces of CD8⁺ T-cells and NK cells. Soluble IL-15:IL15-Rα (IL-15/IL-15Rα) complexes have been shown to modulate immune responses via the IL-15Rβγ_{C} complex, and the biological activity of IL-15 has been shown to be increased 50-fold by administering it in a preformed complex of IL-15 and soluble IL-15Rα, which has an increased half-life compared to IL-15 alone. This significant increase in the therapeutic efficacy of IL-15 by pre-association with IL-15Rα has been demonstrated in murine tumor models (see, e.g., Han et al. (2011) Cytokine 56(3):804-810).

### IL-18

[0981] IL-18 induces the secretion of IFN-γ by NK and CD8⁺ T-cells, enhancing their toxicity. IL-18 also activates macrophages and stimulates the development of Th1 helper CD4⁺ T-cells. IL-18 has shown promising anti-tumor activity in several preclinical mouse models. For example, administration of recombinant IL-18 (rIL-18) resulted in the regression of melanoma or sarcoma in syngeneic mice through the activation of CD4⁺ T-cells and/or NK cell-mediated responses. Other studies showed that IL-18 anti-tumor effects were mediated by IFN-γ, and involved antiangiogenic mechanisms. The combination of IL-18 with other cytokines, such as IL-12, or with co-stimulatory molecules, such as CD80, enhances the IL-18-mediated anti-tumor effects. Phase I clinical trials in patients with advanced solid tumors and lymphomas showed that IL-18 administration was safe, and that it resulted in immune modulatory activity and in the increase of serum IFN-γ and GM-CSF levels in patients, and in modest clinical responses. Clinical trials showed that IL-18 can be combined with other anti-cancer therapeutic agents, such as monoclonal antibodies, cytotoxic drugs, or vaccines (see, e.g., Fabbi et al. (2015) J. Leukoc. Biol. 97:665-675; and Lee, S. and Margolin, K. (2011) Cancers 3:3856-3893).

[0982] It was found that an attenuated strain of Salmonella typhimurium, engineered to express IL-18, inhibited the growth of subcutaneous (S.C.) tumors or pulmonary metastases in syngeneic mice without any toxic effects following systemic administration. Treatment with this engineered bacterium induced the accumulation of T-cells, NK cells, and granulocytes in tumors, and resulted in the intratumoral production of cytokines (see, e.g., Fabbi et al. (2015) J. Leukoc. Biol. 97:665-675).

### Chemokines

[0983] Chemokines are a family of small cytokines that mediate leukocyte migration to areas of injury or inflammation, and that are involved in mediating immune and inflammatory responses. Chemokines are classified into four subfamilies, based on the position of cysteine residues in their sequences, namely XC-, CC-, CXC-, and CX3C-chemokine ligands, or XCL, CCL, CXCL, and CX3CL. The chemokine ligands bind to their cognate receptors and regulate the circulation, homing, and retention of immune cells, with each chemokine ligand-receptor pair selectively regulating a certain type of immune cell. Different chemokines attract different leukocyte populations, and form a concentration gradient in vivo, with attracted immune cells moving through the gradient towards the higher concentration of chemokine (see, e.g., Argyle D. and Kitamura, T. (2018) Front. Immunol. 9:2629; and Dubinett et al. (2010) Cancer J. 16(4):325-335). Chemokines can improve the anti-tumor immune response by increasing the infiltration of immune cells into the tumor, and facilitating the movement of antigen-presenting cells (APCs) to tumor-draining lymph nodes, which primes naïve T-cells and B cells (see, e.g., Lechner et al. (2011) Immunotherapy 3(11):1317-1340). The immunostimulatory bacteria provided herein can be engineered to encode chemokines, including, but not limited to, CCL3, CCL4, CCL5, CXCL9, CXCL10, and CXCL11.

### CCL3, CCL4, CCL5

[0984] CCL3, CCL4, and CCL5 share a high degree of homology, and bind to CCR5 (CCL3, CCL4, and CCL5) and CCR1 (CCL3 and CCL5) on several cell types, including immature DCs and T-cells, in both humans and mice. Therapeutic T-cells have been shown to induce chemotaxis of innate immune cells to tumor sites, via the tumor-specific secretion of CCL3, CCL4, and CCL5 (see, e.g., Dubinett et al. (2010) Cancer J. 16(4):325-335).

[0985] The induction of the T helper cell type 1 (Th1) response releases CCL3. In vivo and in vitro studies of mice have indicated that CCL3 is chemotactic for both neutrophils and monocytes; specifically, CCL3 can mediate myeloid precursor cell (MPC) mobilization from the bone marrow, and has MPC regulatory and stimulatory effects. Human ovarian carcinoma cells transfected with CCL3 showed enhanced T-cell infiltration and macrophages within the tumor, leading to an improved anti-tumor response, and indicated that CCL3-mediated chemotaxis of neutrophils suppressed tumor growth. DCs transfected with the tumor antigen human melanoma-associated gene (MAGE)-1 that were recruited by CCL3 exhibited superior anti-tumor effects, including increased lymphocyte proliferation, cytolytic capacity, and survival, and decreased tumor growth, in a mouse model of melanoma. A combinatorial use of CCL3 with an antigen-specific platform for MAGE-1 has also been used in the treatment of gastric cancer. CCL3 production by CT26, a highly immunogenic murine colon tumor, slowed in vivo tumor growth; this process was driven by the CCL3-dependent accumulation of natural killer (NK) cells, and thus, IFNγ, resulting in the production of CXCL9 and CXLC10 (see, e.g., Allen et al. (2017) Oncoimmunology 7(3):e1393598; and Schaller et al. (2017) Expert Rev. Clin. Immunol. 13(11):1049-1060).

[0986] CCL3 has been used as an adjuvant for the treatment of cancer. Administration of a CCL3 active variant, ECI301, after radiofrequency ablation in mouse hepatocellular carcinoma increased tumor-specific responses, and this mechanism was further shown to be dependent on the expression of CCR1. CCL3 has also shown success as an adjuvant in systemic cancers, whereby mice vaccinated with CCL3 and IL-2 or granulocyte-macrophage colony-stimulating factor (GM-CSF), in a model of leukemia/lymphoma, exhibited increased survival (see, e.g., Schaller et al. (2017) Expert Rev. Clin. Immunol. 13(11):1049-1060).

[0987] CCL3 and CCL4 play a role in directing CD8⁺ T-cell infiltration into primary tumor sites in melanoma and colon cancers. Tumor production of CCL4 leads to the accumulation of CD103⁺ DCs; suppression of CCL4 through a WNT/β-catenin-dependent pathway prevented CD103⁺ DC infiltration of melanoma tumors (see, e.g., Spranger et al. (2015) Nature 523(7559):231-235). CCL3 was also shown to enhance CD4⁺ and CD8⁺ T-cell infiltration to the primary tumor site in a mouse model of colon cancer (see, e.g., Allen et al. (2017) Oncoimmunology 7(3):e1393598).

[0988] The binding of CCL3 or CCL5 to their receptors (CCR1 and CCR5), moves immature DCs, monocytes, and memory and T effector cells from the circulation into sites of inflammation or infection. For example, CCL5 expression in colorectal tumors contributes to T lymphocyte chemoattraction and survival. CCL3 and CCL5 have been used alone or in combination therapy to induce tumor regression and immunity in several preclinical models. For example, studies have shown that the subcutaneous injection of Chinese hamster ovary cells genetically modified to express CCL3, resulted in tumor inhibition and neutrophilic infiltration. In another study, a recombinant oncolytic adenovirus expressing CCL5 (Ad-RANTES-E1A) resulted in primary tumor regression, and blocked metastasis in a mammary carcinoma murine model (see, e.g., Lechner et al. (2011) Immunotherapy 3(11):1317-1340).

[0989] In a translational study of colorectal cancer, CCL5 induced an “antiviral response pattern” in macrophages. As a result of CXCR3-mediated migration of lymphocytes at the invasive margin of liver metastases in colorectal cancer, CCL5 is produced. Blockade of CCR5, the CCL5 receptor, results in tumor death, driven by macrophages producing IFN and reactive oxygen species. While macrophages are present in the tumor microenvironment, CCR5 inhibition induces a phenotypic shift from an M2 to an M1 phenotype. CCR5 blockade also leads to clinical responses in colorectal cancer patients (see, e.g., Halama et al. (2016) Cancer Cell 29(4):587-601).

[0990] CCL3, CCL4, and CCL5 can be used for treating conditions, including lymphatic tumors, bladder cancer, colorectal cancer, lung cancer, melanoma, pancreatic cancer, ovarian cancer, cervical cancer, or liver cancer (see, e.g., U.S. Patent Publication No. US 2015/0232880; and International Application Publication Nos. WO 2015/059303, WO 2017/043815, WO 2017/156349, and WO 2018/191654).

### CXCL9, CXCL10, CXCL11

[0991] CXCL9 (MIG), CXCL10 (IP10), and CXCL11 (ITAC) are induced by the production of IFN-γ. These chemokines bind CXCR3, preferentially expressed on activated T-cells, and function both angiostatically, and in the recruitment and activation of leukocytes. Prognosis in colorectal cancer is strongly correlated to tumor-infiltrating T-cells, particularly Th1 and CD8⁺ effector T-cells; high intratumoral expression of CXCL9, CXCL10 and CXCL11 is indicative of good prognosis. For example, in a sample of 163 patients with colon cancer, those with high levels of CXCL9 or CXCL11 showed increased post-operative survival, and patients with high CXC expression had significantly higher numbers of CD3⁺ T-cells, CD4⁺ T-helper cells, and CD8⁺ cytotoxic T-cells. In liver metastases of colorectal cancer patients, CXCL9 and CXCL10 levels were increased at the invasive margin, and correlated with effector T-cell density. The stimulation of lymphocyte migration via the action of CXCL9 and CXCL10 on CXCR3 leads to the production of CCL5 at the invasive margin (see, e.g., Halama et al. (2016) Cancer Cell 29(4):587-601; and Kistner et al. (2017) Oncotarget 8(52):89998-90012).

[0992] In vivo, CXCL9 functions as a chemoattractant for tumor-infiltrating lymphocytes (TILs), activated peripheral blood lymphocytes, natural killer (NK) cells, and Th1 lymphocytes. CXCL9 also is critical for T-cell-mediated suppression of cutaneous tumors. For example, when combined with systemic IL-2, CXCL9 has been shown to inhibit tumor growth via the increased intratumoral infiltration of CXCR3⁺ mononuclear cells. In a murine model of colon carcinoma, a combination of the huKS1/4-IL-2 fusion protein with CXCL9 gene therapy achieved a superior anti-tumor effect and prolonged lifespan through the chemoattraction and activation of CD8⁺ and CD4⁺ T lymphocytes (see, e.g., Dubinett et al. (2010) Cancer J. 16(4):325-335; and Ruehlmann et al. (2001) Cancer Res. 61(23):8498-8503).

[0993] CXCL10, produced by activated monocytes, fibroblasts, endothelial cells and keratinocytes, is chemotactic for activated T-cells, and can act as an inhibitor of angiogenesis in vivo. Expression of CXCL10 in colorectal tumors has been shown to contribute to cytotoxic T lymphocyte chemoattraction and longer survival. The administration of immunostimulatory cytokines, such as IL-12, has been shown to enhance the anti-tumor effects generated by CXCL10. A dendritic cell (DC) vaccine primed with a tumor cell lysate, and transfected with CXCL10 had increased immunological protection and effectiveness in mice; the animals showed a resistance to a tumor challenge, a slowing of tumor growth, and longer survival time. In vivo and in vitro studies in mice using the CXCL10-mucin-GPI fusion protein resulted in tumors with higher levels of recruited NK cells compared to tumors not treated with the fusion protein. Interferons (which can be produced by plasmacytoid dendritic cells; these cells are associated with primary melanoma lesions and can be recruited to a tumor site by CCL20) can act on tumor DC subsets, for example, CD103⁺ DCs, which have been shown to produce CXCL9/10 in a mouse melanoma model, and have been associated with CXCL9/10 in human disease. CXCL10 also has shown higher expression in human metastatic melanoma samples relative to primary melanoma samples. Therapeutically, adjuvant IFN-α melanoma therapy upregulates CXCL10 production, whereas the chemotherapy agent cisplatin induces CXCL9 and CXCL10 (see, e.g., Dubinett et al. (2010) Cancer J. 16(4):325-335; Kuo et al. (2018) Front. Med. (Lausanne) 5:271; Li et al. (2007) Scand. J. Immunol. 65(1):8-13; and Muenchmeier et al. (2013) PLoS One 8(8):e72749).

[0994] CXCL10/11 and CXCR3 expression has been established in human keratinocytes derived from basal cell carcinomas (BCCs). CXCL11 also is capable of promoting immunosuppressive indoleamine 2,3-dioxygenase (IDO) expression in human basal cell carcinoma, as well as enhancing keratinocyte proliferation, which could reduce the anti-tumor activity of any infiltrating CXCR3⁺ effector T-cells (see, e.g., Kuo et al. (2018) Front. Med. (Lausanne) 5:271).

[0995] CXCL9, CXCL10 and CXCL11 can be encoded in oncolytic viruses for treating cancer (see, e.g., U.S. Patent Publication No. 2015/0232880; and International Application Publication No. WO 2015/059303). Pseudotyped oncolytic viruses or a genetically engineered bacterium encoding the gene for CXCL10 also can be used to treat cancer (see, e.g., International Application Publication Nos. WO 2018/006005 and WO 2018/129404).

b. Co-Stimulatory Molecules

[0996] Co-stimulatory molecules enhance the immune response against tumor cells, and co-stimulatory pathways are inhibited by tumor cells to promote tumorigenesis. The immunostimulatory bacteria herein can be engineered to express co-stimulatory molecules, such as, for example, CD40, CD40L, 4-1BB, 4-1BBL, 4-1BBL with a deletion of the cytoplasmic domain (4-1BBLΔcyt), 4-1BBL with a truncated cytoplasmic domain, OX40 (CD134), OX40L (CD252), other members of the TNFR superfamily (e.g., CD27, CD27 ligand, GITR, CD30, Fas receptor, TRAIL-R, TNF-R, HVEM, and RANK), B7, CD80, CD86, ICOS, ICOS ligand (B7RP1), and CD28. Additionally, the immunostimulatory bacteria can encode and express truncated co-stimulatory molecules (e.g., 4-1BBL, CD80, CD86, CD27L, B7RP1, OX40L), with a full or partial (complete, or truncated, or modified to ensure proper orientation when expressed in a cell) cytoplasmic domain deletion, for expression on an antigen-presenting cell (APC). The gene product with a truncated cytoplasmic domain, including a full deletion, exhibits constitutive immunostimulatory signaling to a T-cell through co-stimulatory receptor engagement, and is unable to counter-regulatory signal to the APC due to a truncated or deleted (or otherwise modified as described herein) cytoplasmic domain. The truncation is sufficient to provide the signaling, and for the modified co-stimulatory molecule to be unable to counter-regulatory signal to the APC. The complete or partial deletion of the cytoplasmic domain of a co-stimulatory molecule, as described herein, potentiates the activation of the co-stimulatory molecule, without the immunosuppressive reverse signaling. The partial deletion (or truncation) of the cytoplasmic domain is a sufficient deletion to achieve these effects, without affecting the expression of the co-stimulatory molecule, or the orientation of the expressed co-stimulatory molecule.

[0997] The co-stimulatory molecules also can be modified to eliminate or reduce the immunosuppressive intracellular/reverse signaling by modifications to the amino acids in the cytoplasmic domain, including insertions, deletions, and/or replacements. In particular, the co-stimulatory molecules are modified by modification, such as by replacement, of cytoplasmic domain phosphorylation sites. For example, replacing one or more Ser residues at an appropriate locus or loci, such as, for human 4-1BBL, Ser5 and Ser8, with a residue that reduces or eliminates reverse signaling.

[0998] The immunostimulatory bacteria herein also can be engineered to express agonistic antibodies against co-stimulatory molecules (e.g., 4-1BBL) to enhance the anti-tumor immune response.

### TNF Receptor Superfamily

[0999] The TNF superfamily of ligands (TNFSF) and their receptors (TNFRSF) are involved in the proliferation, differentiation, activation and survival of tumor and immune effector cells. Members of this family include CD30, Fas-L, TRAIL-R, and TNF-R, which induce apoptosis, and CD27, OX40L, CD40L, GITR-L, and 4-1BBL, which regulate B and T-cell immune responses. Other members include herpesvirus entry mediator (HVEM). The expression of TNFSF and TNFRSF by the immunostimulatory bacteria herein can enhance the anti-tumor immune response. It has been shown, for example, that the expression of 4-1BBL in murine tumors enhances immunogenicity, and that intratumoral injection of dendritic cells (DCs) with increased expression of OX40L can result in tumor rejection in murine models. Studies have also shown that injection of an adenovirus expressing recombinant GITR into B16 melanoma cells promotes T-cell infiltration and reduces tumor volume. Stimulatory antibodies against molecules such as 4-1BB, OX40 and GITR also can be encoded by the immunostimulatory bacteria to stimulate the immune system. For example, agonistic anti-4-1BB monoclonal antibodies have been shown to enhance anti-tumor CTL responses, and agonistic anti-OX40 antibodies have been shown to increase anti-tumor activity in transplantable tumor models. Additionally, agonistic anti-GITR antibodies have been shown to enhance anti-tumor responses and immunity (see, e.g., Lechner et al. (2011) Immunotherapy 3(11):1317-1340; and Peggs et al. (2009) Clinical and Experimental Immunology 157:9-19).

### CD40 and CD40L

[1000] CD40, which is a member of the TNF receptor superfamily, is expressed by APCs and B cells, while its ligand, CD40L (CD154), is expressed by activated T-cells. Interaction between CD40 and CD40L stimulates B cells to produce cytokines, resulting in T-cell activation and tumor cell death. Studies have shown that anti-tumor immune responses are impaired with reduced expression of CD40L on T-cells or CD40 on dendritic cells. CD40 is expressed on the surface of several B-cell tumors, such as follicular lymphoma, Burkitt lymphoma, lymphoblastic leukemia, and chronic lymphocytic leukemia, and its interaction with CD40L has been shown to increase the expression of B7-1/CD80, B7-2/CD86, and human leukocyte antigen (HLA) class II molecules in the CD40⁺ tumor cells, as well as enhance their antigen-presenting abilities. Transgenic expression of CD40L in a murine model of multiple myeloma resulted in the induction of CD4⁺ and CD8⁺ T-cells, local and systemic anti-tumor immune responses, and reduced tumor growth. Anti-CD40 agonistic antibodies also induced anti-tumor T-cell responses (see, e.g., Marin-Acevedo et al. (2018) Journal of Hematology & Oncology 11:39; Dotti et al. (2002) Blood 100(1):200-207; and Murugaiyan et al. (2007) J. Immunol. 178:2047-2055).

### 4-1BB and 4-1BBL

[1001] 4-1BB (CD137) is an inducible co-stimulatory receptor that is expressed primarily by T-cells and NK cells; it binds its ligand 4-1BBL, that is expressed on APCs, including DCs, B-cells, and monocytes, to trigger immune cell proliferation and activation. 4-1BB results in longer and more widespread responses of activated T-cells. Anti-4-1BB agonists and 4-1BBL fusion proteins have been shown to increase immune-mediated anti-tumor activity, for example, against sarcoma and mastocytoma tumors, mediated by CD4⁺ Th1 and tumor-specific CTL activity (see, e.g., Lechner et al. (2011) Immunotherapy 3(11):1317-1340; and Marin-Acevedo et al. (2018) Journal of Hematology & Oncology 11:39). 4-1BBL is negatively regulated by its cytoplasmic signaling domain. In the late-phase of 4-1BBL ligation on macrophages to T-cells, reverse signaling of the 4-1BBL cytoplasmic domain induces surface translocation of 4-1BBL to bind to form a signaling complex with TLR4. This induces high levels of TNF-α, comparable to LPS activation of TLR4, that leads to immunosuppression of the adaptive immune response (see, e.g., Ma et al. (2013) Sci. Signaling 295(6):1-11). Deletion of the cytoplasmic domain of 4-1BBL, as described herein, potentiates the activation of 4-1BBL without the immunosuppressive reverse signaling.

### OX40 and OX40L

[1002] OX40 (CD134) is a member of the TNF receptor superfamily that is expressed on activated effector T-cells, while its ligand, OX40L is expressed on APCs, including DCs, B cells and macrophages, following activation by TLR agonists and CD40-CD40L signaling. OX40-OX40L signaling results in the activation, potentiation, proliferation and survival of T-cells, as well as the modulation of NK cell function and inhibition of the suppressive activity of Tregs. Signaling through OX40 also results in the secretion of cytokines (IL-2, IL-4, IL-5, and IFN-γ), boosting Th1 and Th2 cell responses. The recognition of tumor antigens by tumor-infiltrating lymphocytes (TILs) results in increased expression of OX40 by the TILs, which has been correlated with improved prognosis. Studies have demonstrated that treatment with anti-OX40 agonist antibodies or Fc-OX40L fusion proteins results in enhanced tumor-specific CD4⁺ T-cell responses and increased survival in murine models of melanoma, sarcoma, colon carcinoma, and breast cancer, while Fc-OX40L incorporated into tumor cell vaccines protected mice from subsequent challenge with breast carcinoma cells (see, e.g., Lechner et al. (2011) Immunotherapy 3(11):1317-1340; and Marin-Acevedo et al. (2018) Journal of Hematology & Oncology 11:39).

### B7-CD28 Family

[1003] CD28 is a co-stimulatory molecule expressed on the surface of T-cells that acts as a receptor for B7-1 (CD80) and B7-2 (CD86), which are co-stimulatory molecules expressed on antigen-presenting cells. CD28-B7 signaling is required for T-cell activation and survival, and for the prevention of T-cell anergy, and results in the production of interleukins, such as IL-6.

[1004] Optimal T-cell priming requires two signals: (1) T-cell receptor (TCR) recognition of MHC-presented antigens, and (2) co-stimulatory signals resulting from the ligation of T-cell CD28 with B7-1 (CD80) or B7-2 (CD86) expressed on APCs. Following T-cell activation, CTLA-4 receptors are induced, which then outcompete CD28 for binding to B7-1 and B7-2 ligands. Antigen presentation by tumor cells is poor due to their lack of expression of co-stimulatory molecules, such as B7-1/CD80 and B7-2/CD86, resulting in a failure to activate the T-cell receptor complex. As a result, upregulation of these molecules on the surfaces of tumor cells can enhance their immunogenicity. Immunotherapy of solid tumors and hematologic malignancies has been successfully induced by B7, for example, via tumor cell expression of B7, or soluble B7-immunoglobulin fusion proteins. The viral-mediated tumor expression of B7, in combination with other co-stimulatory ligands, such as ICAM-3 and LFA-3, has been successful in preclinical and clinical trials for the treatment of chronic lymphocytic leukemia and metastatic melanoma. Additionally, soluble B7 fusion proteins have demonstrated promising results in the immunotherapy of solid tumors as single agent immunotherapies (see, e.g., Lechner et al. (2011) Immunotherapy 3(11):1317-1340; and Dotti et al. (2002) Blood 100(1):200-207).

2. Constitutively Active Proteins that Stimulate the Immune Response and/or Type I IFN, Non-Human STING Proteins, STING Chimeras, and Modified Forms

[1005] Type I interferons (IFNs; also referred to as interferon type 1), include IFN-α and IFN-β, and are pleiotropic cytokines with antiviral, anti-tumor, and immunoregulatory activities. IFN-β is produced by most cell types; IFN-α primarily is produced by hematopoietic cells, particularly plasmacytoid dendritic cells. Type I IFNs are produced following the sensing of pathogen-associated molecular patterns (PAMPs) by pattern recognition receptors (PRRs). They are involved in the innate immune response against pathogens, mainly viral, and are potent immunomodulators that promote antigen presentation, mediate dendritic cell (DC) maturation, activate cytotoxic T lymphocytes (CTLs), natural killer (NK) cells and macrophages, and activate the adaptive immune system by promoting the development of high-affinity antigen-specific T-cell and B-cell responses and immunological memory.

[1006] Type I IFNs exhibit anti-proliferative and pro-apoptotic effects on tumors and have anti-angiogenic effects on tumor neovasculature. They induce the expression of MHC class I molecules on tumor cell surfaces, increase the immunogenicity of tumor cells, and activate cytotoxicity against them. Type I IFN has been used as a therapeutic for the treatment of cancers and viral infections. For example, IFN-α (sold under the trademark Intron®/Roferon®-A) is approved for the treatment of hairy cell leukemia, malignant melanoma, AIDS-related Kaposi's sarcoma, and follicular non-Hodgkin's lymphoma; it also is used in the treatment of chronic myelogenous leukemia (CML), renal cell carcinoma, neuroendocrine tumors, multiple myeloma, non-follicular non-Hodgkin's lymphoma, desmoid tumors, and cutaneous T-cell lymphoma, although use is limited due to systemic immunotoxicity (see, e.g., Ivashkiv and Donlin (2014) Nat. Rev. Immunol. 14(1):36-49; Kalliolias and Ivashkiv (2010) Arthritis Research & Therapy 12(Suppl 1):S1; and Lee, S. and Margolin, K. (2011) Cancers 3:3856-3893).

[1007] Expression of type I interferons in tumors and the tumor microenvironment is among the immune responses that the immunostimulatory bacteria herein are designed to evoke. Inducing or evoking type I interferon provides anti-tumor immunity for the treatment of cancer.

a. Constitutive STING Expression and Gain-of-Function Mutations

[1008] The induction of type I IFNs, proinflammatory cytokines and chemokines is necessary for mounting an immune response that prevents or inhibits infection by viral pathogens. This response also can be effective as an anti-tumor agent. The immunostimulatory bacteria provided herein encode proteins that constitutively induce type I IFNs. Among these proteins are those that occur in individuals with various diseases or disorders that involve the over-production of immune response modulators. For example, over-production or excessive production, or defective negative regulation of type I IFNs and pro-inflammatory cytokines, can lead to undesirable effects, such as inflammatory and autoimmune diseases. Disorders involving the overproduction, generally chronic, of type I IFNs, are referred to as interferonopathies (see, e.g., Lu and MacDougall (2017) Front. Genet. 8:118; and Konno et al. (2018) Cell Reports 23:1112-1123). Disorders and clinical phenotypes associated with type I interferonopathies include Aicardi-Goutières syndrome (AGS), STING-associated vasculopathy with onset in infancy (SAVI), Singleton-Merten syndrome (SMS), atypical SMS, familial chilblain lupus (FCL), systemic lupus erythematosus (SLE), bilateral striatal necrosis (BSN), cerebrovascular disease (CVD), dyschromatosis symmetrica hereditaria (DSH), spastic paraparesis (SP), X-linked reticulate pigmentary disorder (XLPDR), proteasome-associated auto-inflammatory syndrome (PRAAS), intracranial calcification (ICC), Mendelian susceptibility to mycobacterial disease (MSMD), and spondyloenchondrodysplasia (SPENCD) (see, e.g., Rodero et al. (2016) J. Exp. Med. 213(12):2527-2538). These phenotypes are associated with particular genotypes, involving mutations in genes that lead to constitutive activities of products involved in the induction of type I IFNs.

[1009] The sustained activation of interferon signaling can be due to: 1) loss-of-function mutations leading to increased cytosolic DNA (e.g., mutations in TRFX1 and SAMHD1), or increased cytosolic RNA/DNA hybrids (e.g., mutations in RNASEH2A, RNASEH2B, RNASEH2C, and POLA1); 2) loss-of-function mutations resulting in a defect in RNA editing and abnormal sensing of self-nucleic acid RNA species in the cytosol (e.g., mutations in ADAR1); 3) gain-of-function mutations leading to constitutive activation of cytosolic IFN signaling pathways/increased sensitivity to cytosolic nucleic acid ligands (e.g., mutations in RIG-I, MDA5 and STING); 4) loss-of-function mutations leading to aberrant RNA signaling via MAVS caused by a disturbance of the unfolded protein response (e.g., mutations in SKIV2L); 5) loss-of-function mutations in molecules responsible for limiting IFN receptor (IFNAR1/2) signaling, leading to uncontrolled IFN-stimulated gene (ISG) production (e.g., mutations in USP18 and ISG15); 6) proteasomal dysfunction, leading to increased IFN signaling through an unknown mechanism (e.g., mutations in PSMA3, PSMB4 and PSMB8); and 7) loss-of-function mutations in TRAP/ACP5 and C1q, where the mechanisms leading to type I IFN signaling remain unclear (see, e.g., Rodero et al. (2016) J. Exp. Med. 213(12):2527-2538).

[1010] Of interest herein are mutations that lead to gain-of-function (GOF). There are known mutations in STING, MDA5 and RIG-I, that are associated with constitutive activation of the encoded proteins, and/or enhanced sensitivity or increased affinity or binding to endogenous ligands. GOF mutations in STING, for example, are linked to SAVI and FCL; GOF mutations in MDA5 are linked to AGS and SMS; and GOF mutations in RIG-I are linked to atypical SMS.

### TMEM173 STING Alleles

[1011] Stimulator of interferon genes (STING) is encoded by the transmembrane protein 173 (TMEM173) gene, which is a ˜7 kb-long gene. The human TMEM173 gene is characterized by significant heterogeneity and population stratification of alleles. The most common human TMEM173 allele is referred to as R232 (referencing the amino acid present at residue 232; see, e.g., SEQ ID NOs:305-309, setting forth the sequences of various human TMEM173 alleles). More than half the American population is not R232/R232. The second most common allele is R71H-G230A-R293Q (HAQ). Other common alleles include AQ (G230A-R293Q), Q (Q293) and R232H (named REF after the reference STING allele first identified and catalogued in the database by Glen Barber).

[1012] R232/R232 is the most common genotype in Europeans, while HAQ/R232 is the most common genotype in East Asians. Africans have no HAQ/HAQ genotypes, but have the Q allele, and ˜4% of Africans are AQ/AQ, which is absent in other ethnic populations (see, e.g., Patel and Jin (2018) Genes & Immunity, doi:10.1038/s41435-018-0029-9). The REF, AQ and Q alleles are highly refractory to bacterially-derived CDNs, such as 3′3′ c-di-GMP (see, e.g., Corrales et al. (2015) Cell Reports 11:1018-1030).

### STING Gain-of-Function Mutations

[1013] Several activating or gain-of-function (GOF) mutations in TMEM173, the gene for STING, inherited and de novo, have been linked to the rare auto-inflammatory disease SAVI (STING-associated vasculopathy with onset in infancy). SAVI is an autosomal dominant disease and is characterized by systemic inflammation, interstitial lung disease, cutaneous vasculitis, and recurrent bacterial infection. SAVI with de novo TMEM173 mutations typically is characterized by an early-onset (<8 weeks) and severe phenotype, while familial mutations result in late-onset (teens to adults) and milder clinical symptoms. Inherited TMEM173 activating mutations include G166E and V155M, whereas de novo mutations include N154S, V155M, V147M, V147L, C206Y, R284G, R281Q, and S102P/F279L (see, e.g., Patel and Jin (2019) Genes & Immunity 20:82-89). Other activating TMEM173 mutations that have been identified include R284M, R284K, R284T, E316Q, and R375A (see, e.g., U.S. Application Publication No. 2018/0311343). Another gain-of-function mutation in TMEM173 is R284S, which results in a highly constitutively active STING, and was found to trigger innate immune signaling in the absence of activating CDNs, leading to chronic production of pro-inflammatory cytokines (see, e.g., Konno et al. (2018) Cell Reports 23:1112-1123).

[1014] TMEM173 mutations, such as N154S, V155M and V147L, and/or any of the mutations listed in the table below, singly or in any combination, with these and any other such mutations, such as N154S/R284G, result in a gain-of-function STING that is constitutively active and does not require, or is hypersensitive to, ligand stimulation, leading to chronic activation of the STING-interferon pathway. This has been demonstrated (see, e.g., Liu et al. (2014) N. Engl. J. Med. 371:507-518). Constructs of mutated TMEM173 (with each of the replacements V147L, N154S, V155M, and the loss-of-function mutant V155R), and non-mutated TMEM173, were transfected into STING-negative HEK293T cells, and stimulated with the STING ligand, cGAMP. Cells transfected with the N154S, V155M and V147L mutants exhibited highly elevated IFNB1 (the gene encoding IFN-β) reporter activity, which was not significantly boosted by stimulation with the STING ligand cGAMP. Cells that were transfected with the loss-of-function mutant (V155R), non-mutated TMEM173, or control plasmid, had no significant baseline activation. Stimulation with cGAMP resulted in a response in a dose-dependent manner in cells with non-mutated TMEM173, and resulted in a minimal response only at the highest cGAMP concentration, in cells expressing the loss-of-function mutant (see, e.g., Liu et al. (2014) N. Engl. J. Med. 371:507-518). These results show that the activating TMEM173 mutations result in constitutive activation of STING, even in the absence of stimulation by cGAMP.

[1015] G207E is another gain-of-function STING mutation that causes alopecia, photosensitivity, thyroid dysfunction, and SAVI-features. The G207E mutation causes constitutive activation of inflammation-related pathways in HEK cells, as well as aberrant interferon signature and inflammasome activation in patient peripheral blood mononuclear cells (PBMCs). Using STING variants with the R232 or H232 allele and the GOF mutation G207E, it was shown that after stimulation with CDN, the R232+G207E variant resulted in slight increases of activity in the IFN-β and STAT1/2 pathways, while with the H232+G207E variant, IFN-β levels remained constant, and STAT1/2 showed diminished activity. Both variants showed similar STAT3 and NF-κB pathway activation following stimulation. These results show that the residue R at position 232 is important for cGAMP binding and IFN induction, and show that G207E mutants result in constitutive activation of STING signaling pathways and ligand-dependent hyperactivation of the NF-κB pathway. Patients with the R232 allele and the G207E mutation had more severe disease; this polymorphism strengthens the constitutive activation of the mutant STING, leading to the overexpression of downstream targets, such as IFN, IL1-β, and IL-18 (see, e.g., Keskitalo et al. (2018), available from: doi.org/10.1101/394353).

[1016] 67 amino acids in murine STING (SEQ ID NO:369) were mutated (see, Burdette et al. (2011) Nature 478(7370):515-518), either individually or in groups, to identify amino acids involved in cyclic di-GMP (c-di-GMP) binding and/or IFN induction. Among the mutants identified were hyperactive mutants R196A/D204A, S271A/Q272A, R309A/E315A, E315A, E315N, E315Q, and S271A (corresponding to R197A/D205A, S272A/Q273A, R310A/E316A, E316A, E316N, E316Q, and S272A, respectively, with reference to the sequence of human STING as set forth in SEQ ID NOs:305-309), that spontaneously induced IFN at low levels of transfection and did not respond to c-di-GMP, and the mutants R374A, R292A/T293A/E295A/E299A, D230A, R231A, K235A, Q272A, S357A/E359A/S365A, D230A/R231A/K235A/R237A, and R237A (corresponding to R375A, R293A/T294A/E296A (there is no equivalent to E299 in human STING), D231A, R232A, K236A, Q273A, S358A/E360A/S366A, D231A/R232A/K236A/R238A, and R238A, respectively, with reference to human STING, as set forth in SEQ ID NOs:305-309), that induced IFN when overexpressed but did not respond to c-di-GMP. These alleles can still respond to the endogenous CDN 2′3′ c-di-GAMP, as it was later discovered that some human STING mutations have low affinity for the 3′3′ CDNs produced by bacteria, such as c-di-GMP (see, e.g., Corrales et al. (2015) Cell Reports 11:1018-1030).

[1017] The immunostimulatory bacteria provided herein that encode these proteins with gain-of-function mutations exploit the constitutive activation of these proteins to increase production of type I IFNs and pro-inflammatory cytokines. Tumor-targeting immunostimulatory bacteria are provided herein that encode STING, IRF3, IRF5, IRF7, MDA5, and/or RIG-I, with gain-of-function mutations. The immunostimulatory bacteria increase the production of type I IFN-mediated cytokines and chemokines in the tumor microenvironment, potentiating the anti-tumor immune response and improving the therapeutic efficacy of the immunostimulatory bacteria. The gene encoding STING is referred to as TMEM173, the gene encoding MDA5 is IFIH1, and the gene encoding RIG-I is DDX58. There are numerous alleles for each gene, and known mutations that can occur in genes with any of the alleles, resulting in gain-of-function or constitutive activation. The mutations listed below can occur singly, or can be used in any combination. Other mutations that result in gain-of-function can be identified by routine screening/mutation protocols. The table below lists exemplary gain-of-function mutations in each of STING/TMEM173 (SEQ ID NOs:305-309), MDA5/IFIH1 (SEQ ID NO:310), RIG-IDDX58 (SEQ ID NO:311), IRF3 (SEQ ID NO:312), and IRF7 (SEQ ID NO:313). Other mutations, such as deletion of, or replacement of, a phosphorylation site or sites, such as S324/L325/S326-S324A/L325/S326A in STING, and other replacements to eliminate a phosphorylation site to reduce nuclear factor-κB (NF-κB) signaling in STING, or other proteins that employ such signaling, also can be introduced.

[1018] The resulting proteins can be encoded in the immunostimulatory bacteria provided herein. The proteins are encoded on plasmids in the immunostimulatory bacteria.

[1019] Administering nucleic acids encoding wild-type STING can induce an immune response; the administration of gain-of-function STING mutants, with constitutive activity as provided herein, in tumor-targeted immunostimulatory bacteria, leads to a more potent immune response and more effective anti-cancer therapeutic. The enhanced immune response by the tumor-targeted administration of constitutively active STING, or other such modified DNA/RNA sensors, such as gain-of-function mutants of MDA5, RIG-I, IRF3, or IRF7, as provided herein, provides a therapeutically more effective anti-cancer treatment. For example, as described herein, modifying the immunostimulatory bacteria so that they do not infect epithelial cells, but retain the ability to infect phagocytic cells, including tumor-resident immune cells, effectively targets the immunostimulatory bacteria to the tumor microenvironment, improving therapeutic efficiency and preventing undesirable systemic immune responses. These tumor-targeted bacteria are engineered to encode gain-of-function STING, MDA5, RIG-I, IRF3, or IRF7 mutants, which are constitutively active, for example, even in the absence of ligand stimulation, providing a potent type I IFN response to improve the anti-cancer immune response in the tumor microenvironment.

[1020] Thus, for example, the administration of constitutively activated STING can provide an alternative means to boost STING signaling for the immunotherapeutic treatment of cancer. In certain embodiments, the tumor-targeting immunostimulatory bacteria provided herein can be modified to encode STING/TMEM173 (SEQ ID NOs: 305-309) with gain-of-function mutations, selected from S102P, V147L, V147M, N154S, V155M, G166E, R197A, D205A, R197A/D205A, C206Y, G207E, D231A, R232A, K236A, R238A, D231A/R232A/K236A/R238A, S272A, Q273A, S272A/Q273A, F279L, S102P/F279L, R281Q, R284G, R284S, R284M, R284K, R284T, R293A, T294A, E296A, R293A/T294A/E296A, R310A, E316A, E316N, E316Q, R310A/E316A, S324A/S326A, S358A, E360A, S366A, S358A/E360A/S366A, and R375A, as well as conservative mutations thereof. In addition, combinations of STING gain-of-function mutations, such as N154S/R284G, significantly increase STING signaling, compared to the single mutation counterparts. These mutations result in constitutive activity of STING.

Table of Exemplary Gain-Of-Function Mutants
Gain-of-Function Mutations Resulting in the Persistent Expression of Type I IFN

| STING | RIG-I | MDA5 | IRF3 | IRF7 |
|---|---|---|---|---|
| V147L | E373A | T331I | S396D | S477D/S479D |
| N154S | C268F | T331R | S396D/S398D | S475D/S476D/S477D/S47 |
| | | | | 9D/S483D/S487D |
| V155M | | A489T | S396D/S398D/ | Δ247-467 |
| | | | S402D/T404D/ | |
| | | | S405D | |
| G166E | | R822Q | | S475D/S477D/S479D |
| C206Y | | G821S | | |
| G207E | | A452T | | |
| R281Q | | A946T | | |
| R284G | | R337G | | |
| R284S | | D393V | | |
| R284M | | G495R | | |
| R284K | | R720Q | | |
| R284T | | R779H | | |
| S102P | | R779C | | |
| F279L | | L372F | | |
| R197A | | | | |
| D205A | | | | |
| S102P/F279L | | | | |
| R197A/D205A | | | | |
| S272A/Q273A | | | | |
| R310A/E316A | | | | |
| R310A | | | | |
| E316A | | | | |
| E316N | | | | |
| E316Q | | | | |
| S272A | | | | |
| R375A | | | | |
| R293A | | | | |
| T294A | | | | |
| E296A | | | | |
| R293A/T294A/E296A | | | | |
| D231A | | | | |
| R232A | | | | |
| K236A | | | | |
| Q273A | | | | |
| S358A | | | | |
| E360A | | | | |
| S366A | | | | |
| S358A/E360A/S366A | | | | |
| D231A/R232A/K236A/R238A | | | | |
| R238A | | | | |
| V147M | | | | |
| S324A/S326A | | | | |
| N154S/R284G | | | | |

[1021] Amino acid residues R197, D205, R310, R293, T294, E296, S272, Q273, E316, D231, R232, K236, S358, E360, S366, and R238, with reference to the sequence of human STING, as set forth in any of SEQ ID NOs:305-309, correspond to amino acid residues R196, D204, R309, R292, T293, E295, S271, Q272, E315, D230, R231, K235, S357, E359, S365, and R237, respectively, of the murine STING, as set forth in SEQ ID NO:369. Also included are conservative substitutions of each of the replacements (see, e.g., the Table in the Definitions section, listing exemplary conservative mutations for each amino acid).

b. Constitutive IRF3 Expression and Gain-of-Function Mutations

[1022] IRF3 (interferon regulatory factor 3, or IRF-3) and IRF7 (or IRF-7) are key activators of type I IFN genes. Following virus-induced C-terminal phosphorylation (by TBK1), activated IRF3 and IRF7 form homodimers, translocate from the cytoplasm to the nucleus, and bind to IFN-stimulated response elements (ISREs) to induce type I IFN responses. IRF3 is expressed constitutively in unstimulated cells, and exists as an inactive cytoplasmic form, while IRF7 is not constitutively expressed in cells, and is induced by IFN, lipopolysaccharide and virus infection. Overexpression of IRF3 significantly increases the virus-mediated expression of type I IFN genes, resulting in the induction of an antiviral state. IRF3 activation also has been shown to up-regulate the transcription of the CC-chemokine RANTES (CCL5) following viral infection (see, e.g., Lin et al. (1999) Mol. Cell Biol. 19(4):2465-2474).

[1023] Residues S385, S386, S396, S398, S402, T404, and S405 in the C-terminal domain of IRF3 are phosphorylated after virus infection, inducing a conformational change that results in the activation of IRF3. IRF3 activation is induced, not only by viral infection, but also by lipopolysaccharide (LPS) and poly(I:C). Of the seven residues that can be phosphorylated in the C-terminal cluster of IRF3, a single point mutation, S396D, is sufficient for the generation of a constitutively active form of IRF3. IRF3(S396D) enhances the transactivation of IFNα1, IFN-β, and RANTES promoters by 13-, 14-, and 11-fold, respectively, compared to wild-type IRF3. Another mutant, IRF3(S396D/S398D), enhances the transactivation of IFNα1, IFN-β, and RANTES promoters by 13-, 12-, and 12-fold, respectively, compared to wild-type IRF3. Another constitutively active mutant of IRF3 is IRF3(5D), in which the serine or threonine residues at positions 396, 398, 402, 404, and 405 are replaced by phosphomimetic aspartic acid residues (IRF3(S396D/S398D/S402D/T404D/S405D)). Similar gain-of-function mutations, leading to constitutive activity of immune response mediators, such as induction of type I interferon, can be achieved by mutating serine residues to phosphomimetic aspartic acid in other proteins, such as RIG-I, MDA5 and STING, that are in immune response signaling pathways.

[1024] IRF3(5D) displays constitutive DNA binding and transactivation activities, dimer formation, association with the transcription coactivators p300 (also called EP300, or E1A binding protein p300)/CBP (also known as CREB-binding protein, or CREBBP), and nuclear localization. Its transactivation activity is not induced further by virus infection. IRF3(5D) is a very strong activator of IFN-β and ISG-15 gene expression; IRF3(5D) alone stimulates IFN-β expression as strongly as virus infection, and enhances transactivation of IFNα1, IFN-β, and RANTES promoters by 9-fold, 5.5-fold, and 8-fold, respectively, compared to wild-type IRF3 (see, e.g., Lin et al. (2000) J. Biol. Chem. 275(44):34320-34327; Lin et al. (1998) Mol. Cell Biol. 18(5):2986-2996; and Servant et al. (2003) J. Biol. Chem. 278(11):9441-9447). Any of positions S385, S386, S396, S398, S402, T404, and S405 can be mutated, alone or in combination, to produce constitutively active IRF3 mutants in the immunostimulatory bacteria provided herein.

c. Non-Human STING Proteins, and Variants Thereof with Increased or Constitutive Activity, and STING Chimeras, and Variants Thereof with Increased or Constitutive Activity

[1025] As discussed above, cytosolic double-stranded DNA (dsDNA) stimulates the production of type I interferon (IFN) through the endoplasmic reticulum (ER)-resident adaptor protein STING (stimulator of IFN genes), which activates the transcription factor interferon regulatory factor 3 (IRF3). The TANK binding kinase 1 (TBK1)/IRF3 axis results in the induction of type I IFNs, and the activation of dendritic cells (DCs) and cross-presentation of tumor antigens to activate CD8⁺ T cell-mediated anti-tumor immunity. STING signaling also activates the nuclear factor kappa-light-chain-enhancer of activated B cell (NF-κB) signaling axis, resulting in a pro-inflammatory response, but not in the activation of the DCs and CD8⁺ T-cells that are required for anti-tumor immunity.

[1026] Upon recognition of 2′3′-cGAMP, STING translocates from the endoplasmic reticulum through the Golgi apparatus, allowing the recruitment of TANK-binding kinase 1 (TBK1), and the activation of the transcription factors IRF3 and NF-κB. The carboxyl-terminal tail (C-terminal tail or CTT) region of STING is necessary and sufficient to activate TBK1 and stimulate the phosphorylation of IRF3; it also is involved in NF-κB signaling. The CTT is an unstructured stretch of approximately 40 amino acids that contains sequence motifs required for STING phosphorylation and recruitment of IRF3. IRF3 and NF-κB downstream signaling is attributed to specific sequence motifs within the C-terminal tail (CTT) of STING that are conserved among vertebrate species. Modular motifs in the CTT, which include IRF3-, TBK1-, and TRAF6-binding modules, control the strength and specificity of cell signaling and immune responses.

[1027] Depending on the species and the respective characteristics of their STING CTT discrete elements, the IRF3 and NF-κB downstream responses can be affected, and sometimes opposite. The STING CTT elements dictate and finely tune the balance between the two signaling pathways, resulting in different biological responses. In human and mouse immune cells, for example, STING-dependent IRF3 activation results predominantly in a type I interferon response. STING signaling in human cells also drives a pro-inflammatory response through canonical and possibly non-canonical NF-κB pathways via TRAF6 recruitment. Human STING residue S366 (see, e.g., SEQ ID NOs:305-309) is a primary TBK1 phosphorylation site that is part of an LxIS motif in the CTT, which is required for IRF3 binding, while a second PxPLR motif, including residue L374, is required for TBK1 binding. The LxIS and PxPLR motifs are highly conserved in all vertebrate STING alleles. In other species, STING signaling results predominantly in the activation of the NF-κB signaling axis. For example, the zebrafish CTT, which is responsible for hyperactivation of NF-κB signaling, contains an extension with a highly conserved PxExxD motif at the extreme C-terminus that is not present in human and other mammalian STING alleles; this motif shares similarity with tumor necrosis factor receptor-associated factor 6 (TRAF6) binding sites. While the role of TRAF6 in human STING signaling is non-essential, TRAF6 recruitment is essential for zebrafish STING-induced NF-κB activation. A human-zebrafish STING chimera, in which human STING was engineered to contain the zebrafish STING CTT module DPVETTDY, induced more than 100-fold activation of NF-κB activation, indicating that this region is necessary and sufficient to direct enhanced NF-κB signal activation. The addition of the zebrafish CTT also resulted in an increased STING interferon response (see, de Oliveira Mann et al. (2019) Cell Reports 27:1165-1175).

[1028] The differences among species in the balance between IRF3 and NF-κB signaling is exploited herein to produce modified STING proteins that have reduced NF-κB signaling, and/or optionally, increased IRF3 signaling, so that when the STING protein is delivered to and expressed in the TME, the resulting response is an increased anti-tumor/anti-viral response, compared to the unmodified STING protein.

[1029] In some embodiments, STING proteins from species that have low or no NF-κB signaling activity are provided in delivery vehicles, including any of the immunostimulatory bacteria described herein or known to those of skill in the art, as well as in other delivery vehicles, such as viral vectors, including oncolytic vectors, minicells, exosomes, liposomes, and in cells, such as T-cells that are used in cell therapy and used to deliver vehicles, such as bacteria and oncolytic vectors.

[1030] The non-human STING proteins can be, but are not limited to, STING proteins from the following species: Tasmanian devil (Sarcophilus harrisii; SEQ ID NO:349), marmoset (Callithrix jacchus; SEQ ID NO:359), cattle (Bos taurus; SEQ ID NO:360), cat (Felis catus; SEQ ID NO:356), ostrich (Struthio camelus australis; SEQ ID NO:361), crested ibis (Nipponia nippon; SEQ ID NO:362), coelacanth (Latimeria chalumnae; SEQ ID NOs:363-364), boar (Sus scrofa; SEQ ID NO:365), bat (Rousettus aegyptiacus; SEQ ID NO:366), manatee (Trichechus manatus latirostris; SEQ ID NO:367), ghost shark (Callorhinchus milii; SEQ ID NO:368), and mouse (Mus musculus; SEQ ID NO:369). These vertebrate STING proteins readily activate immune signaling in human cells, indicating that the molecular mechanism of STING signaling is shared in vertebrates (see, de Oliveira Mann et al. (2019) Cell Reports 27:1165-1175).

[1031] In other embodiments, the non-human STING proteins contain any of the constitutive STING activation and gain-of-function mutations, at corresponding loci in the non-human STING corresponding to those in human STING, described above (see, Example 17 below, which provides exemplary alignments and corresponding mutations in various species; see, also, FIGS. 1-13).

[1032] In other embodiments, chimeras of STING proteins are provided. In the chimeras, the CTT region, or portion(s) thereof that confers or participates in NF-κB signaling/activity, of a first species STING protein is replaced with the corresponding CTT or portion(s) thereof from a second species, whose STING protein has lower or very little, less than human, NF-κB signaling activity. Generally, the first species is human, and the replacing CTT or portion(s) thereof is from the STING of a species such as Tasmanian devil, marmoset, cattle, cat, ostrich, boar, bat, manatee, crested ibis, coelacanth, and ghost shark, which have much lower NF-κB activity. This thereby results in a STING protein that induces type I interferon, which is important for anti-tumor activity, and that has limited or no NF-κB activity, which is not desirable in an anti-tumor therapy. The chimeras can further include the human constitutive STING activation and gain-of-function mutations in corresponding loci to increase or render type I interferon activity constitutive. In all embodiments, the TRAF6 binding motif can be deleted to further decrease or eliminate activity that is not desirable in an anti-tumor therapeutic. These non-human STING proteins, chimeras, and mutants are provided in delivery vehicles, such as any described herein or known to those of skill in the art, including oncolytic viral vectors, cells, such as stem cells and T-cells that are used in cell therapies, exosomes, minicells, liposomes, and the immunostimulatory bacteria provided herein, which accumulate in tumor-resident immune cells, and deliver encoded proteins to the tumor microenvironment and to tumors. The non-human STING proteins, modified STING proteins, and STING chimeras, are for use as therapeutics for the treatment of tumors as described herein, or for use in other methods known to those of skill in the art. Pharmaceutical compositions containing the STING proteins, delivery vehicles, and encoding nucleic acids also are provided.

d. Other Gene Products that Act as Cytosolic DNA/RNA Sensors and Constitutive Variants Thereof

[1033] Other gene products that sense or interact with cytosolic nucleic acids are the retinoic acid-inducible gene I (RIG-I)-like receptors (RLRs), which include RIG-I and MDA5 (melanoma differentiation-associated protein 5). RLRs are cytoplasmic sensors of viral dsRNA and nucleic acids secreted by bacteria, and include RIG-I, MDA5, and LGP2 (laboratory of genetics and physiology 2). Upon the binding of a ligand, such as a viral dsRNA, RIG-I and MDA5 activate the mitochondrial antiviral-signaling adaptor protein, or MAVS, which recruits tumor necrosis factor (TNF) receptor-associated factors (TRAFs), to assemble a signaling complex at the outer membranes of the mitochondria. Downstream signaling components further are recruited by TRAFs, resulting in the phosphorylation and activation of IRF3 (interferon regulatory factor 3), IRF7, NF-κB (nuclear factor kappa-light-chain-enhancer of activated B cells), and AP-1 (activator protein 1). As a result, the expression of IFNs, proinflammatory cytokines, and other genes involved in pathogen clearance, is induced (see, e.g., Lu and MacDougall (2017) Front. Genet. 8:118). Like STING, the constitutive activation of MDA5 and RIG-I due to gain-of-function mutations leads to the induction of type I IFNs, which can be leveraged to enhance the anti-tumor immune response in the immunostimulatory bacteria.

i. RIG-I

[1034] Retinoic acid-inducible gene I (RIG-I), also known as DDX58 (DEXD/H-box helicase 58), is another protein whose constitutive activation has been linked to the development of interferonopathies, such as atypical Smith-Magenis syndrome. RIG-I, like MDA5/IFIH1, is a member of the RIG-I-like receptor (RLR) family, and is a 925-residue cytosolic pattern recognition receptor that functions in the detection of viral dsRNA. RIG-I initiates an innate immune response to viral RNA through independent pathways that promote the expression of type I and type III IFNs and proinflammatory cytokines (see, e.g., Jang et al. (2015) Am. J. Hum. Genet. 96:266-274; and Lu and MacDougall (2017) Front. Genet. 8:118).

[1035] Atypical Smith-Magenis syndrome, without hallmark dental anomalies, but with variable phenotypes, including glaucoma, aortic calcification and skeletal abnormalities, has been found to be caused by mutations in the DEXD/H-box helicase 58 gene (DDX58), which encodes retinoic acid-inducible gene I (RIG-I). In particular, the mutations E373A and C268F in DDX58 were identified as causing gain-of-function in RIG-I. Elevated amounts of mutated DDX58 were associated with a significant increase in the basal levels of NF-κB reporter gene activity, and this activity was further increased by stimulation with the dsRNA analog poly(I:C). The RIG-I mutations also induced IRF3 phosphorylation and dimerization at the basal level, and led to increased expression of IFNB1, interferon-stimulated gene 15 (ISG15), and chemokine (C-C motif) ligand 5 (CCL5) in both basal, and poly(I:C) transfected HEK293FT cells. These results indicate that the mutated DDX58/RIG-I results in constitutive activation, leading to increased IFN activity and IFN-stimulated gene expression (see, e.g., Jang et al. (2015) Am. J. Hum. Genet. 96:266-274; and Lu and MacDougall (2017) Front. Genet. 8:118). Tumor-targeting immunostimulatory bacteria provided herein can be modified to encode RIG-I/DDX58 (see, e.g., SEQ ID NO:311) with gain-of-function mutations such as, but not limited to, E373A and C268F, singly, and in combination.

ii. MDA5/IFIH1

[1036] Another interferonopathy gene is the IFN-induced with helicase C domain-containing protein 1 (IFIH1), also known as melanoma differentiation-associated protein 5 (MDA5), which is a member of the RIG-I-like family of cytoplasmic DExD/H box RNA receptors. MDA5, encoded by IFIH1, is a 1,025 amino acid cytoplasmic pattern-recognition receptor that senses viral double-stranded RNA (dsRNA) and secreted bacterial nucleic acids in the cytoplasm, and activates type I IFN signaling through an adaptor molecule, MAVS (mitochondrial antiviral-signaling protein). MAVS recruits tumor necrosis factor (TNF) receptor-associated factors (TRAFs), which in turn recruit downstream signaling components, resulting in the phosphorylation and activation of IRF3 (interferon regulatory factor 3), IRF7, NF-κB (nuclear factor kappa-light-chain-enhancer of activated B cells), and AP-1 (activator protein 1). This results in the expression of IFNs, proinflammatory cytokines, and other genes involved in pathogen clearance (see, e.g., Rutsch et al. (2015) Am. J. Hum. Genet. 96:275-282; Rice et al. (2014) Nat. Genet. 46(5):503-509; and Lu and MacDougall (2017) Front. Genet. 8:118).

[1037] Gain-of-function (GOF) IFIH1 variants occur in subjects with autoimmune disorders, including Aicardi-Goutiéres syndrome (AGS) and Singleton-Merten syndrome (SMS), which are characterized by prominent vascular inflammation. AGS is an inflammatory disease particularly affecting the brain and skin, and is characterized by an upregulation of interferon-induced transcripts. AGS typically occurs due to mutations in any of the genes encoding DNA exonuclease TREX1, the three non-allelic components of the RNase H2 endonuclease complex, the deoxynucleoside triphosphate triphosphohydrolase SAMHD1, and the double-stranded RNA editing enzyme ADAR1. Some patients with AGS do not have mutations in any of these genes, but have GOF mutations in IFIH1, indicating that this gene also is implicated in AGS. Singleton-Merten syndrome is an autosomal-dominant disorder characterized by abnormalities in the blood vessels (e.g., calcification), teeth (e.g., early-onset periodontitis, root resorption), and bones (e.g., osteopenia, acro-osteolysis, osteoporosis). Interferon signature genes are upregulated in Singleton-Merten syndrome patients, which was linked to GOF mutations in IFIH1 (see, e.g., Rice et al. (2014) Nat. Genet. 46(5):503-509; and Rutsch et al. (2015) Am. J. Hum. Genet. 96:275-282).

[1038] The IFN-β reporter stimulatory activity of wild-type IFIH1, and six IFIH1 GOF mutants identified in AGS patients (R720Q, R779H, R337G, R779C, G495R, D393V), was compared in HEK293T cells, which express low levels of endogenous viral RNA receptors. Wild-type IFIH1 was induced upon binding of the long (>1 kb) dsRNA analog polyinosinic-polycytidylic acid (poly(I:C)), but not by a short 162 bp dsRNA, and had minimal activity in the absence of exogenous RNA. The IFIH1 mutants displayed a significant induction of IFN signaling in response to the short 162 bp dsRNA, in addition to robust signaling in response to poly(I:C). The mutants also displayed a 4-10 fold higher level of baseline signaling activity in the absence of exogenous ligand (Rice et al. (2014) Nat. Genet. 46(5):503-509).

[1039] Another gain-of-function IFIH1 mutation, R822Q, was identified as causing Singleton-Merten syndrome by triggering type I IFN production, and leading to early arterial calcification, as well as dental inflammation and resorption. HEK293T cells (which have the lowest endogenous IFIH1 expression levels) were used to overexpress wild-type and R822Q MDA5. Wild-type IFIH1 expression led to an increase in the expression of IFNB1 (interferon, beta 1, fibroblast) in a dose-dependent manner, whereas the mutated IFIH1 led to approximately 20-fold more IFNB1 expression. Following stimulation with the dsRNA analog poly(I:C), R822Q IFIH1 resulted in higher levels of IFNB1 expression than wild-type IFIH1, indicating that R822Q IFIH1 is hyperactive to non-self dsRNA. There was also higher expression of interferon signature genes, such as IF127, IF144L, IFIT1, ISG15, RSG15, RSAD2, and SIGLEC1 in whole-blood samples from Singleton-Merten syndrome patients, which was in agreement with the higher expression level of IFNB1 by R822Q IFIH1 (see, e.g., Rutsch et al. (2015) Am. J. Hum. Genet. 96:275-282).

[1040] The interferon signature observed in patients with another IFIH1 GOF mutation, A489T, is indicative of a type I interferonopathy; IFIH1 A489T is associated with increased interferon production and phenotypes resembling chilblain lupus, AGS, and SMS (see, e.g., Bursztejn et al. (2015) Br. J. Dermatol. 173(6):1505-1513). The A489T variant not only resulted in IFN induction following stimulation with the long dsRNA analog poly(I:C), but also with short dsRNA. Two additional gain-of-function mutations in IFIH1, T331I and T331R, were identified in patients with SMS phenotypes, who presented with a significant upregulation of IFN-induced transcripts. The T331I and T331R variants resulted in increased expression of IFN-β, even in the absence of exogenous dsRNA ligand, consistent with the observed constitutive activation of MDA5 (see, e.g., Lu and MacDougall (2017) Front. Genet. 8:118).

[1041] A946T is another IFIH1 GOF mutation that leads to the increased production of type I IFN, promoting inflammation and increasing the risk of autoimmunity. The A946T mutation in IFIH1 results in additive effects when combined with the TMEM173 R232 allele and the G207E GOF mutation in STING, leading to a severe early-onset phenotype with features similar to SAVI (see, e.g., Keskitalo et al. (2018) preprint, available from doi.org/10.1101/394353). G821S is a GOF mutation in IFIH1 which has been shown to lead to spontaneously developed lupus-like autoimmune symptoms in a mouse model (see, e.g., Rutsch et al. (2015) Am. J. Hum. Genet. 96:275-282), while the IFIH1 missense mutations A452T, R779H, and L372F, identified in individuals with AGS, were shown to cause type I interferon overproduction (see, e.g., Oda et al. (2014) Am. J. Hum. Genet. 95:121-125).

[1042] The tumor-targeting immunostimulatory bacteria provided herein can be modified to encode MDA5/IFIH1 (see, e.g., SEQ ID NO:310) with gain-of-function mutations selected from T331I, T331R, R337G, L372F, D393V, A452T, A489T, G495R, R720Q, R779H, R779C, G821S, R822Q, and A946T, singly, or in any combination.

iii. IRF7

[1043] Constitutively active forms of IRF7 (or IRF-7) include mutants in which different C-terminal serines are substituted by phosphomimetic Asp, including IRF7(S477D/S479D), IRF7(S475D/S477D/S479D), and IRF7(S475D/S476D/S477D/S479D/S483D/S487D). IRF7(S477D/S479D) is a strong transactivator for IFNA and RANTES gene expression, and stimulates gene expression, even in the absence of virus infection. IRF7(S475D/S477D/S479D), and IRF7(S475D/S476D/S477D/S479D/S483D/S487D) do not further augment the transactivation activity of IRF7(S477D/S479D), but the transactivation activity of all three mutants is stimulated further by virus infection. The mutant IRF7(A247-467), which localizes to the nucleus in uninfected cells, is a very strong constitutive form of IRF7; it activates transcription more than 1500-fold higher than wild-type IRF7 in unstimulated and virus infected cells (see, e.g., Lin et al. (2000) J. Biol. Chem. 275(44):34320-34327). The immunostimulatory bacteria provided herein, can encode and express constitutively active IRF7 mutants, including those with replacements at residues 475-477, 479, 483, and 487, and those with amino acid deletions. The immunostimulatory bacteria encode these proteins on plasmids under the control of promoters and, any other desired regulatory signals recognized by mammalian hosts, including humans.

e. Other Type I IFN Regulatory Proteins

[1044] Other proteins involved in the recognition of DNA/RNA that activate type I IFN responses can be mutated to generate constitutive type I IFN expression. The unmodified and/or modified proteins can be encoded in the immunostimulatory bacteria provided herein, to be used to deliver the protein to the tumor microenvironment, such as to tumor-resident immune cells, to increase expression of type I IFN.

[1045] These proteins include, but are not limited to, proteins designated TRIM56, RIP1, Sec5, TRAF2, TRAF3, TRAF6, STAT1, LGP2, DDX3, DHX9 (DDX9), DDX1, DDX21, DHX15, DHX33, DHX36, DDX60, and SNRNP200.

| | Encoded | |
|---|---|---|
| Gene | Protein | Activity/Function |
| TRIM56 | Tripartite motif- | Promotes dimerization of STING in response to |
| | containing protein 56/E3 | dsDNA stimulation, resulting in production of IFN-β; |
| | ubiquitin-protein ligase | potentiates extracellular dsRNA-induced expression of |
| | TRIM56 | IFNB1 and IFN-stimulated genes ISG15, IFIT1/ISG56, |
| | | CXCL10, OASL and CCL5; positive regulator of |
| | | TLR3 signaling |
| RIP1/RIPK1 | Receptor-interacting | Transduces inflammatory and cell-death signals |
| | serine/threonine protein | (programmed necrosis) following death receptor |
| | (kinase) 1 | ligation, activation of pathogen recognition receptors |
| | | and DNA damage; indirectly activates NF-κB; directs |
| | | LPS-induced IFN-β synthesis in mice |
| Sec5 (EXOC2) | Exocyst complex | Component of exocyst complex, involved in docking of |
| | component 2 | exocytic vesicles with fusion sites on plasma |
| | | membrane; co-localizes with STING and TBK1 after |
| | | intracellular DNA stimulation, inducing type I IFN |
| | | production |
| TRAF2 | TNF receptor-associated | Regulates activation of NF-κB and JNK/MAPK8; |
| | factor 2 | mediates type I IFN induction |
| TRAF3 | TNF receptor-associated | Regulates activation of NF-κB and MAP kinases; |
| | factor 3 | mediates activation of IRF3; mediates type I IFN |
| | | induction; mediates cytokine production |
| TRAF6 | TNF receptor-associated | Activates NF-κB, JUN, and AP-1; induces type I IFN |
| | factor 6 | production in response to viral infection and |
| | | intracellular dsRNA; induces production of |
| | | proinflammatory cytokines |
| STAT1 | Signal transducer and | Forms part of ISGF3 transcription factor, which binds |
| | activator of transcription 1 | IFN stimulated response elements (ISREs) to activate |
| | | transcription of IFN-stimulated genes (ISGs) |
| LGP2 | Laboratory of genetics | Regulates RIG-I/DDX58- and IFIH1/MDA5-mediated |
| (DHX58) | and physiology 2/ | antiviral signaling |
| | Probable ATP-dependent | |
| | RNA helicase DHX58 | |
| DDX3 | ATP-dependent RNA | Promotes production of type I IFN; acts as viral RNA |
| (DDX3X) | helicase DDX3X | sensor; involved in TBK1 and IKBKE-dependent IRF3 |
| | | activation, leading to induction of IFNB; associates |
| | | with IFNB promoters; associates with MAVS and RIG- |
| | | I to induce signaling in early stages of infection; binds |
| | | MDA5 to enhance its recognition of dsRNA |
| DHX9/DDX9 | DExD/H-box helicase 9/ | Senses viral nucleic acids; triggers host responses to |
| | ATP-dependent RNA | non-self DNA in MyD88-dependent manner; interacts |
| | helicase A | with MAVS to stimulate NF-κB-mediated innate |
| | | immunity against virus infection and activate IRF3 and |
| | | MAPK pathways; potentiates virus-triggered induction |
| | | of IL-6 and IFN-β |
| DDX1 | ATP-dependent RNA | Component of a multi-helicase-TRIF complex that |
| | helicase DDX1 | senses viral double-stranded RNA (dsRNA), activates |
| | | the NF-κB signaling pathway, and induces production |
| | | of type I IFN and proinflammatory cytokines |
| DDX21 | Nucleolar RNA helicase 2 | Component of a multi-helicase-TRIF complex that |
| | | senses viral double-stranded RNA (dsRNA), activates |
| | | the NF-κB signaling pathway, and induces production |
| | | of type I IFN and proinflammatory cytokines |
| DHX15 | Pre-mRNA-splicing factor | Viral RNA sensor that interacts with MAVS to induce |
| (DDX15) | ATP-dependent RNA | type I IFN and proinflammatory cytokine production; |
| | helicase DHX15 | activates IRF3, NF-κB, and MAPK signaling |
| DHX33 | ATP-dependent RNA | Viral dsRNA sensor that interacts with MAVS and |
| (DDX33) | helicase DHX33 | triggers type I IFN response; activates NF-κB, IRF3, |
| | | and MAPK signaling pathways; activates NLRP3 |
| | | inflammasome, resulting in secretion of |
| | | proinflammatory cytokines |
| DHX36 | ATP-dependent | Component of a multi-helicase-TRIF complex that |
| (DDX36) | DNA/RNA helicase | senses viral double-stranded RNA (dsRNA), activates |
| | DHX36 | the NF-κB signaling pathway, and induces production |
| | | of type I IFN and proinflammatory cytokines |
| DDX60 | Probable ATP-dependent | Senses viral RNA and DNA; forms complex with RIG- |
| | RNA helicase DDX60 | I like receptors to promote antivirus activity; positively |
| | | regulates RIG-I and MDA5-dependent type I IFN and |
| | | IFN-inducible gene expression in response to viral |
| | | infection; binds ssRNA, dsRNA, and dsDNA; |
| | | promotes binding of RIG-I to dsRNA |
| SNRNP200 | U5 small nuclear | Senses/binds viral RNA and interacts with TBK1 to |
| | ribonucleoprotein 200 | promote IRF3 activation and type I IFN production |
| | kDa helicase | |

[1046] Gain-of-function variants can be produced, such as by screening and/or by mutagenesis. Site-directed mutagenesis can be performed in vitro to identify mutations with enhanced activity, that lead to higher level and/or constitutive type I IFN expression. Intact genomic DNA can be obtained from non-related patients experiencing auto-immune and auto-inflammatory symptoms, and from healthy individuals, to screen for and identify other products whose expression leads to increased or constitutive type I IFN expression. Whole exome sequencing can be performed, and introns and exons can be analyzed, such that proteins with mutations in the pathways associated with the increased or constitutive expression of type I interferon are identified. After identification of mutations, cDNA molecules encoding the full-length gene, with and without the identified mutation(s), are transfected into a reporter cell line that measures expression of type I interferon. For example, a reporter cell line can be generated where the expression of luciferase is placed under the control of the promoter for IFN-β. A gain-of-function mutant that is constitutively active will promote the expression of IFN-β, whereas the unstimulated wild-type protein will not. Stimulation can be by virus infection, bacterial infection, bacterial nucleic acids, LPS, dsRNA, poly(I:C), or by increasing exogenous levels of the protein's ligand (e.g., CDNs). Identified proteins also include those that enhance an immune response to an antigen(s) of interest in a subject. The immune response comprises a cellular or humoral immune response characterized by one or more of: (i) stimulating type I interferon pathway signaling; (ii) stimulating NF-κB pathway signaling; (iii) stimulating an inflammatory response; (iv) stimulating cytokine production; (v) stimulating dendritic cell development, activity, or mobilization; (vi) any other responses indicative of a product whose expression enhances an immune response; and (vii) a combination of any of (i)-(vi).

### 3. Antibodies and Antibody Fragments

[1047] Advances in antibody engineering have led to the creation of recombinant antibody fragments that have many improvements over conventional monoclonal antibodies, especially in terms of manufacturing, tissue penetration, and ease of use. An example of these is the single-chain fragment variable (scFv), consisting of the variable regions of the heavy (V_{H}) and light (V_{L}) chains of the antibody binding site, joined together by a flexible peptide linker that is generally the (G₄S)₃ sequence (see, e.g., Weisser et al. (2009) Biotechnol. Adv. 27(4):502-520). Other examples include scFv-Fc antibody fragments, in which the V_{H} domain of the scFv is linked to an Fc region, as well as dimers and multimers and other combinations and forms of antibodies that are known to those of skill in the art. Antibody fragments and other constructs allow for targeting of antigens in a manner that can be encoded on a plasmid and delivered, as exemplified herein, by an immunostimulatory bacterium. Examples of antigens to target, include, tumor antigens, including those discussed in the Examples below, and other exemplary targets discussed below and elsewhere herein. Any target known to the skilled person is included, as are neo-antigens formed upon changes in conformation or structure.

a. TGF-β

[1048] Transforming growth factor beta (TGF-β) is a pleiotropic cytokine with numerous roles in embryogenesis, wound healing, angiogenesis, and immune regulation. It exists in three isoforms in mammalian cells, TGF-β1, TGF-β2, and TGF-β3; TGF-β1 is the most predominant in immune cells (see, e.g., Esebanmen et al. (2017) Immunol. Res. 65:987-994). TGF-β's role as an immunosuppressant is arguably its most dominant function. Its activation from a latent form in the tumor microenvironment, in particular, has profound immunosuppressive effects on DCs and their ability to tolerize antigen-specific T-cells. TGF-β also can directly convert Th1 CD4⁺ T-cells to immunosuppressive Tregs, further promoting tumor tolerance (see, e.g., Travis et al. (2014) Annu. Rev. Immunol. 32:51-82). Based on its tumor-specific immunosuppressive functions, and irrespective of its known cancer cell growth and metastasis-promoting properties, inhibition of TGF-β is a cancer therapy target. High levels of TGF-β signaling have been demonstrated in several human tumor types, including colorectal cancer (CRC), hepatocellular carcinoma (HCC), pancreatic ductal adenocarcinoma (PDAC), and non-small-cell lung cancer (NSCLC) (see, e.g., Colak et al. (2017) Trends Cancer 3(1):56-71). Systemic inhibition of TGF-β can lead to unacceptable autoimmune toxicities, and its inhibition should be localized to the tumor microenvironment. One way to accomplish this is to create a soluble TGF-β receptor that acts as a decoy for binding TGF-β (see, e.g., Zhang et al. (2008) J. Immunol. 181:3690-3697). As such, a tumor-targeting immunostimulatory bacteria, containing a TGF-β receptor decoy, provided herein, can bind and remove TGF-β from the tumor microenvironment, thereby breaking tumor immune tolerance and stimulating anti-tumor immunity.

[1049] In addition to TGF-beta binding decoy receptors, other TGF-beta polypeptide antagonists, that can bind to and eliminate or reduce TGF-β in the tumor microenvironment, thereby breaking tumor immune tolerance and stimulating anti-tumor immunity, are included. Exemplary of such are anti-TGF-beta antibodies or antibody fragments, anti-TGF-beta receptor antibodies or antibody fragments, and soluble TGF-beta antagonist polypeptides.

[1050] Immunostimulatory bacteria are provided herein that accumulate in the tumor microenvironment, in tumors, and in particular, in tumor-resident immune cells, and that contain plasmids encoding TGF-beta polypeptide antagonists, including, for example, TGF-beta binding decoy receptors (TGF-β receptor decoys), anti-TGF-beta antibodies or antibody fragments, anti-TGF-beta receptor antibodies or antibody fragments, and soluble TGF-beta antagonist polypeptides. The antibody fragments can include any known in the art, or described herein, such as, but not limited to, scFvs and scFv-Fcs.

b. Bispecific scFvs and T-Cell Engagers

[1051] The use of scFvs has been improved by increasing the valency of binding to the target, often through the use of one or more scFv fragments (bis-specific, tri-specific, etc.), joined together by a long linker. Bi-specific T-cell engager (available under the trademark BiTE®) constructs are a class of artificial bispecific monoclonal antibodies that are utilized in cancer immunotherapy, and are formed by linking two single-chain variable fragments (scFvs), such that one scFv binds CD3 on the surface of cytotoxic T-cells, and the other binds a specific tumor-associated antigen (TAA). BiTEs® thus target T-cells to tumor cells, stimulating T-cell activation, cytokine production and tumor cell cytotoxicity independently of MHC class I or co-stimulatory molecules. Two examples of bi-specific T-cell engagers (BiTEs®) have been approved by the FDA, including catumaxomab (Removab®), which is directed against the tumor antigen EpCAM, and against CD3, and is used in the treatment of malignant ascites, and blinatumomab (BLINCYTO®), a BiTE® antibody directed against CD19 and CD3, which is used for the treatment of relapsed, refractory acute lymphoblastic leukemia (ALL; see, e.g., Ahamadi-Fesharaki et al. (2019) Mol. Ther. Oncolytics 14:38-56). Other bi-specific T-cell engagers (BiTEs®) target a variety of antigens, including, for example, carcinoembryonic antigen (CEA), prostate-specific membrane antigen (PSMA), EGFR, EphA2, HER2/neu, ADAM17/TACE, prostate stem cell antigen (PSCA), Delta-like ligand 3 (DDL3), and melanoma-associated chondroitin sulfate proteoglycan (MCSP). As exemplified herein, a BiTE® antibody also can be expressed from a plasmid following delivery by an immunostimulatory bacterium.

c. Anti-PD-1, Anti-PD-L1 and Anti-CTLA-4 Antibodies
i. Anti-PD-1/Anti-PD-L1 Antibodies

[1052] Programmed cell death protein 1 (PD-1) is an immune-inhibitory receptor that is involved in the negative regulation of immune responses. Its cognate ligand, programmed death-ligand 1 (PD-L1), is expressed on antigen-presenting cells (APCs), and upon binding to PD-1 on T-cells, leads to loss of CD8⁺ T-cell effector function, inducing T-cell tolerance. The expression of PD-L1 is often associated with tumor aggressiveness and reduced survival in certain human cancers (see, e.g., Gao et al. (2009) Clin. Cancer Res. 15(3):971-979).

[1053] Antibodies designed to block immune checkpoints, such as anti-PD-1 (for example, pembrolizumab, and nivolumab) and anti-PD-L1 (for example, atezolizumab, avelumab, and durvalumab) antibodies can prevent T-cell anergy and break immune tolerance. Only a fraction of treated patients, however, exhibit clinical benefit, and those that do, often present with autoimmune-related toxicities (see, e.g., Ribas (2015) N. Engl. J. Med. 373(16):1490-1492; and Topalian et al. (2012) N. Engl. J. Med. 366(26):2443-2454). Besides acquiring toxicity, anti-PD-1/anti-PD-L1 therapy often leads to resistance, and the concomitant use of anti-CTLA-4 antibodies (for example, ipilimumab) has shown limited success in clinical trials, with significantly additive toxicity. To limit the toxicity and enhance the potency of PD-1/PD-L1 blockade, an immunostimulatory bacterium, containing a plasmid encoding an antibody or antibody fragment, such as an scFv and scFv-Fc, and others known in the art and/or described herein, against PD-1 or against PD-L1, will synergize with activation of immune cells to potentiate anti-tumor immunity.

ii. Anti-CTLA-4 Antibodies

[1054] CTLA-4 (cytotoxic T-lymphocyte-associated protein 4), also known as CD152 (cluster of differentiation 152), is another immune-inhibitory receptor that functions as an immune checkpoint, and downregulates immune responses. CTLA-4 is constitutively expressed in regulatory T-cells (Tregs, or T_{regs}), and contributes to their inhibitory function, but is upregulated in conventional T-cells only after activation. CTLA-4 functions as an immune checkpoint by transmitting inhibitory signals to T-cells. CTLA-4 is homologous to the T-cell co-stimulatory protein, CD28, and both molecules bind to CD80 (also known as B7-1 or B7.1) and CD86 (also known as B7-2 or B7.2) ligands on antigen-presenting cells (APCs). The binding of CTLA-4 to the ligands transmits an inhibitory signal to T-cells, whereas the binding of CD28 transmits a stimulatory signal.

[1055] Following T-cell activation, CTLA-4 receptors are induced, which then outcompete CD28 receptors on T-cells, for binding to CD80 and CD86 ligands on the surfaces of APCs. CTLA-4 binds to CD80 and CD86 with greater affinity and avidity than CD28, thus enabling it to outcompete CD28 for its ligands, resulting in the transmittal of inhibitory signals to T-cells, and an immune inhibitory response. T-cell activation through the T-cell receptor and CD28 leads to increased expression of CTLA-4.

[1056] Optimal T-cell priming requires co-stimulatory signals resulting from the ligation of T-cell CD28 with CD80 and/or CD86. The blockade of CTLA-4 from binding to these ligands thus enhances T-cell priming, and allows for the induction of an anti-tumor immune response.

[1057] In some embodiments, the immunostimulatory bacterial strains provided herein contain plasmids encoding anti-CTLA-4 antibodies, including fragments thereof, such as, but not limited to, anti-CTLA-4 scFvs (see, e.g., copending PCT application International PCT Application No. PCT/US2020/060307 for sequences of exemplary human anti-CTLA-4 scFv and scFv-Fc fragments; see, also, Example 25).

d. Additional Exemplary Checkpoint Targets

[1058] Exemplary immune checkpoint targets for which an scFv, or any other recombinant antibody fragment against them can be prepared, or are exemplified herein include, but are not limited to, those listed in the table below:

Checkpoint target

CTLA-4
PD-L1 (B7-H1)
PD-L2
PD-1, PD-2
IDO1
IDO2
SIRP alpha (CD47)
VISTA (B7-H5)
LIGHT
HVEM
CD28
LAG3, TIM3, TIGIT
Galectin-9
CEACAM1, CD155, CD112,
CD226, CD244 (2B4)
B7-H2, B7-H3, CD137,
ICOS, GITR, B7-H4, B7-H6
CD137, CD27, CD40,
CD40L, CD48, CD70, CD80,
CD86, CD137 (4-1BB), 4-
1BBL, CD200, CD272
(BTLA), CD160
A2a receptor, A2b receptor,
HHLA2, ILT-2, ILT-4,
gp49B, PIR-B
OX40, OX-40L, HLA-G,
ILT-2/4
KIR, TIM1, TIM4
CLEVER-1/Stabilin-1

4. Combinations of Immunomodulatory Proteins can have Synergistic Effects and/or Complementary Effects

[1059] Cytokines are powerful modulators of the anti-tumor immune response. Cytokine combinations are known to have profound synergistic effects on different immune compartments involving T-cells, NK cells, and myeloid cells (including dendritic cells and macrophages). Cytokines are known to play major roles in antigen priming by dendritic cells, survival and proliferation of innate immune cells and antigen-specific T-cells, and the cytotoxic activity of NK and T-cells. Cytokine combinations must be properly chosen to maximize biological responses and enhance anti-tumor immunity. For example, in a murine model of hepatitis, IFN-α alone was found to enhance the CD8⁺ T-cell cytolytic function of virally infected cells, while IL-15 alone enhanced the proliferation of activated lymphocytes. Together, they maximally suppressed hepatitis B (HBV) infection (see, e.g., Di Scala et al. (2016) J. Virol. 90(19):8563-8574). In another example, combinations of the cytokines IL-15+IL-18, and IL-15+IL-21, were able to enhance the production of IFN-γ from human NK and T-cells (see, e.g., Strengell et al. (2003) J. Immunol. 170(11):5464-5469). In another example, IL-2+IL-18 synergized to enhance IFN-γ production and increase the cytolytic function of CD4⁺ T-cells, CD8⁺ T cells, and NK lymphocytes (see, e.g., Son et al. (2001) Cancer Res. 61(3):884-888). Additionally, IL-12 and IL-18 were found to synergize to promote antigen-CD3 T-cell ligation-independent production of IFN-γ from human T-cells (see, e.g., Tominaga et al. (2000) Int. Immunol. 12(2):151-160). Combinations of cytokines are powerful enhancers of T-cell function, but the FDA-approved anti-cancer cytokines are too toxic to be dosed systemically and are thus rarely used, and combinations of systemically-administered cytokines only compound the toxicity (see, e.g., Conlon et al. (2019) J. Interferon Cytokine Res. 39(1):6-21).

[1060] The immunostimulatory bacteria provided herein solve these problems. Provided are immunostimulatory bacteria containing plasmids encoding multiple therapeutic products, such as immunomodulatory proteins, that allow for tumor-specific delivery of cytokine combinations and/or combinations with other therapeutic products, such as the inducers of type I interferon discussed herein, and others, including co-stimulatory molecules, chemokines, and antibodies and fragments thereof. These immunostimulatory bacteria achieve powerful and synergistic immuno-activation without the systemic toxicities and pharmacokinetic (PK) liabilities associated with direct IV administration of the cytokines and other therapeutic products.

[1061] Combinations of therapeutic products that can be encoded on the plasmids in the immunostimulatory bacteria provided herein include, but are not limited to, for example, two or more cytokines; one or more cytokines and an inducer of type I IFN (e.g., STING, IRF3, IRF7, MDA5, RIG-I, and constitutively active, GOF variants thereof), and/or a co-stimulatory molecule (e.g., 4-1BBL and 4-1BBLΔcyt); a TGF-β decoy receptor and one or more cytokines; a TGF-β decoy receptor and an inducer of type I IFN; a TGF-β decoy receptor, one or more cytokines, and/or an inducer of type I IFN, and/or a co-stimulatory molecule; an antibody (e.g., against an immune checkpoint, such as CTLA-4) and one or more cytokines; an antibody and an inducer of type I IFN; an antibody, one or more cytokines, and/or an inducer of type I IFN, and/or a co-stimulatory molecule; a co-stimulatory molecule agonist (e.g., a CD40 agonist) and one or more cytokines; a co-stimulatory molecule agonist and an inducer of type I IFN; and a co-stimulatory molecule agonist, one or more cytokines, and/or an inducer of type I IFN, and/or a co-stimulatory molecule.

[1062] As discussed below, the multiple therapeutic product expression cassettes can include single promoter constructs and/or dual/multiple promoter constructs, as well as post-transcriptional regulatory elements, and other regulatory elements, such as enhancers, polyadenylation signals, terminators, signal peptides, etc. The nucleic acid sequences can be codon optimized to increase protein expression, and generally, are under control of a eukaryotic promoter. Particular constructs and details thereof are described elsewhere herein.

[1063] Among the immunostimulatory bacteria provided herein are those that contain plasmids encoding immunostimulatory proteins (e.g., cytokines, chemokines, co-stimulatory molecules), and/or gene products with gain-of-function mutations that increase immune responses in the tumor microenvironment (e.g., cytosolic DNA/RNA sensors that induce type I IFN), and/or antibodies and fragments thereof, and/or other therapeutic products that enhance the anti-tumor response, such as TGF-β and/or IL-6 decoy receptors, and/or TGF-β antagonizing polypeptides. These immunostimulatory bacteria that encode the cytokines, gain-of-function products/type I IFN pathway proteins, and/or chemokines, and/or co-stimulatory molecules, and/or antibodies and fragments thereof, such as single-chain antibodies, and other therapeutic products discussed herein, include the immunostimulatory bacteria that preferentially infiltrate the tumor microenvironment, tumors, and tumor-resident immune cells. The immunostimulatory bacteria also include those in which the genome is modified so that they induce less cell death in tumor-resident immune cells, whereby the immunostimulatory bacteria accumulate in tumor-resident myeloid cells, to achieve high level ectopic expression of multiplexed genetic payloads in the target cells, and deliver the therapeutic products/immunomodulatory proteins to the tumor microenvironment (TME), to stimulate the immune response against the tumor. In particular, the immunostimulatory bacteria provided herein include up to about 8 or 8 modifications as described herein, including, but not limited to, adenosine auxotrophy, csgD⁻, pagP⁻, msbB⁻, flagellin⁻ (such as, for example, fliC⁻/fljB⁻), purI⁻, ansB⁻, asd⁻, and any other modifications described herein or known to improve targeting to, or accumulation in, the tumor microenvironment and/or tumor-resident myeloid cells, or to improve safety and tolerability (allowing for a higher dose), reduce the immunosuppressive cytokine profile, improve T-cell quality and function, limit replication in healthy tissues, eliminate biofilms, and improve the anti-tumor immune response, or to impart any of the desirable and advantageous properties discussed elsewhere herein.

[1064] The immunostimulatory bacteria further can encode other therapeutic products, such as a tumor antigen from the subject's tumor, to enhance the response against the particular tumor. Any of the immunostimulatory bacteria provided herein and described above and below can be modified to encode the therapeutic products, such as cytokines, chemokines, co-stimulatory molecules and gain-of-function type I IFN pathway product(s). The therapeutic products are encoded on a plasmid under control of a promoter recognized by the host, and any other desired regulatory sequences recognized in a eukaryotic, such as a human, or other animal, or mammalian, subject. Generally, the nucleic acid encoding the product is under the control of an RNA polymerase II promoter. Additionally, any of the bacteria described herein for modification, such as any of the strains of Salmonella, Shigella, E. coli, Bifidobacteriae, Rickettsia, Vibrio, Listeria, Klebsiella, Bordetella, Neisseria, Aeromonas, Francisella, Cholera, Corynebacterium, Citrobacter, Chlamydia, Haemophilus, Brucella, Mycobacterium, Mycoplasma, Legionella, Rhodococcus, Pseudomonas, Helicobacter, Bacillus, and Erysipelothrix, or an attenuated strain thereof, or a modified strain thereof, can be modified by introducing a plasmid containing, or by encoding on a plasmid in the bacteria, nucleic acid encoding the therapeutic product(s) under control of an RNA polymerase promoter recognized by the host. The therapeutic products are expressed in the infected subject's cells. The immunostimulatory bacteria include those that are modified, as described herein, to accumulate in, or to preferentially infect, tumors, the TME and/or tumor-resident myeloid cells. For example, immunostimulatory bacteria that encode gain-of-function products leading to the expression of, or the constitutive expression of, type I interferon (IFN), such as IFN-beta, and/or other therapeutic products as discussed herein, further are modified to have reduced ability or no ability to infect epithelial cells, but are able to infect phagocytic cells, including tumor-resident immune cells, and/or the immunostimulatory bacteria are modified so that they do not kill the infected phagocytic cells.

[1065] As described herein, genes involved in the SPI-1 pathway, and flagella, activate the inflammasome in phagocytic cells (immune cells), triggering pyroptosis. Knocking out SPI-1 genes and genes that encode flagella, decreases or eliminates pyroptosis of phagocytic cells, and also, eliminates infection of epithelial cells, resulting in increased infection of phagocytic cells. Provided are immunostimulatory bacteria that accumulate in phagocytic cells, particularly tumor-resident immune cells, such as, for example, myeloid-derived suppresser cells (MDSCs), tumor-associated macrophages (TAMs), and dendritic cells (DCs), in which they express the genetic payloads/therapeutic products encoded on plasmids that are controlled by eukaryotic promoters, such as those recognized by RNA polymerase II, and include other eukaryotic regulatory signals, as discussed herein. Expressed therapeutic products include those that evoke immune responses, such as through pathways that increase or induce type I interferons, which increase the host response in the tumor microenvironment. The immunostimulatory bacteria also can encode immunostimulatory proteins, such as IL-2 and/or other cytokines, and/or other immunostimulatory proteins and therapeutic products, as discussed herein, further enhancing the immune response in the tumor microenvironment.

[1066] The immunostimulatory bacteria can encode products, referred to as cytosolic DNA/RNA sensors, that evoke immune responses when exposed to nucleic acids, such as RNA, DNA, nucleotides, dinucleotides, cyclic nucleotides, cyclic dinucleotides, and other such molecules, in the cytosol of cells. The immunostimulatory bacteria herein, encode modified therapeutic products that constitutively evoke immune responses, and do not require the presence of the DNA/RNA in the cytosol. Exemplary of such are components of pathways that induce type I interferon expression. The therapeutic products contemplated herein include modified forms of these cytosolic DNA/RNA sensors, that have constitutive activity or increased activity (i.e., gain-of-function products), such that type I interferon(s) is/are expressed or produced in the absence of nucleotides, dinucleotides, cyclic nucleotides, cyclic dinucleotides, and other such ligands, in the cytosol of cells. Expression of these modified products in cells, particularly in tumor cells, including tumor-resident immune cells, leads to constitutive expression of type I interferons, including interferon-β, in the tumor microenvironment. Because the immunostimulatory bacteria that express these gain-of-function products accumulate in or preferentially infect tumor cells/the TME/tumor-resident immune cells, the therapeutic products are expressed in the tumor microenvironment, resulting in increased immune responses in the tumor microenvironment.

[1067] Exemplary gene products that can be encoded in the immunostimulatory bacteria and other vehicles, include, but are not limited to, proteins that sense or are involved in innate pathways that recognize cytosolic DNA/RNA and activate type I interferon production. Proteins involved in innate DNA/RNA recognition that activate type I interferon include, but are not limited to: STING, RIG-I, MDA5, IRF3, IRF7, TRIM56, RIP1/RIPK1, Sec5/EXOC2, TRAF2, TRAF3, TRAF6, STAT1, LGP2/DHX58, DDX3/DDX3X, DHX9/DDX9, DDX1, DDX21, DHX15/DDX15, DHX33/DDX33, DHX36/DDX36, DDX60, and SNRNP200. Gain-of-function mutations in any of these proteins that result in constitutive type I interferon expression are known, or can be identified, and the mutants can be delivered by the immunostimulatory bacteria to the tumor microenvironment, such as by infection of phagocytic cells, or by targeting and binding to tumor cells.

[1068] The gain-of-function mutations include those identified from individuals with disorders resulting from constitutive type I interferon expression. Exemplary of gain-of-function products are those that occur in subjects with interferonopathies. As noted above, mutations can be identified by screening, to generate gain-of-function products as well.

[1069] The nucleic acids encoding the therapeutic products further can be modified to improve properties for expression. Modifications include, for example, codon optimization to increase transcriptional efficiency in a mammalian, particularly human, subject, such as reduction of GC content or CpG dinucleotide content, removal of cryptic splicing sites, adding or removing (generally removing) CpG islands, replacement of the Shine-Dalgarno (SD) sequence, and replacement of TATA box and/or terminal signals to increase transcriptional efficiency. Codons can be optimized for increasing translation efficiency by altering codon usage bias, decreasing GC content, decreasing mRNA secondary structure, removing premature poly(A) sites, removing RNA instability motifs (ARE), reducing stable free energy of mRNA, modifying internal chi sites and ribosomal binding sites, and reducing RNA secondary structures. Additional modifications to improve expression, and to maintain or enhance bacterial fitness have been incorporated into the immunostimulatory bacteria. These are described in sections below, and detailed and exemplified in the working Examples below.

[1070] As described above, type I interferon induction pathways, mediated by host recognition of cytosolic nucleic acids, such as single-stranded and double-stranded RNA, cyclic di-nucleotides (CDNs), and other such forms of nucleic acids, induce type I IFN. There also are Toll-Like Receptor (TLR)-independent type I IFN pathways, mediated by host recognition of single-stranded (ss) and double-stranded (ds) RNA in the cytosol. These are sensed by RNA helicases, including retinoic acid-inducible gene I (RIG-I), melanoma differentiation-associated gene 5 (MDA5), and through IFN-β promoter stimulator 1 (IPS-1) adaptor protein-mediated phosphorylation of the IRF3 transcription factor, leading to induction of IFN-β (see, e.g., Ireton and Gale (2011) Viruses 3(6):906-919). As discussed herein, proteins in these pathways can be modified, or can exist as variants, that result in constitutive expression of type I interferons (also referred to as interferon type 1), which include IFN-α and IFN-β. Exemplary of such proteins are the modified STING proteins described, including those provided, herein. These include modified STING proteins with mutations that result in constitutive expression of the type I interferons so that the interferons are expressed in the absence of induction, including modified non-human STING proteins and human STING proteins, and also, chimeric STING proteins, such as those in which the C-terminal tail (CTT) portion is replaced with a CTT portion from a STING protein from a second species, wherein the STING protein of the second species has lower NF-κB signaling activity than the NF-κB signaling activity of human STING, and the TRAF6 binding site in the CTT optionally is deleted, and chimeric STING proteins that further include one or more gain-of-function mutations.

[1071] Therapy with the immunostimulatory bacteria provided herein can be combined with any other anti-cancer therapy, including checkpoint inhibitor therapies and, as discussed above and elsewhere herein, other cancer treatments and chemotherapy.

5. Molecules that Activate Prodrugs

[1072] The plasmids in the immunostimulatory bacteria provided herein can include nucleic acids that encode molecules, such as enzymes, that activate, such as by cleavage of a portion of, therapeutic products, such as prodrugs, including chemotherapeutic prodrugs, particularly toxins, that are activated by enzymatic cleavage. As a result, the inactive prodrug can be administered systemically, and is inactive. The plasmid-encoded activating molecule, such as an enzyme, is expressed in the tumor microenvironment after delivery of the immunostimulatory bacteria provided herein, so that the inactive prodrug is activated in the tumor microenvironment, where it exerts its anti-tumor effect. There are many examples of such prodrugs, including certain nucleosides, and toxin conjugates. Many such prodrugs and enzymes are known (see, e.g., Malekshah et al., (2016) Curr. Pharmacol. Rep. 2(6):299-308). These include prodrugs of 5-fluorouracil (5-FU), oxazaphosphorines, platinum drugs, and enzymes, such as deaminases, nitroreductases, phosphorylases, and cytochrome P450 enzymes, and many others.

6. Immunostimulatory Bacteria that Deliver Combination Therapies

[1073] The immunostimulatory bacteria herein can be used to provide more than one therapeutic product, particularly those that are for anti-cancer therapy. In general, the products are complementary products to enhance and re-program the anti-tumor immune response. The immunostimulatory bacteria, by virtue of the genomic modifications described herein, particularly the combination of several or of all of asd, flagellin⁻ (such as fliC⁻/fljB⁻), pagP⁻, csgD⁻, purI⁻, adenosine auxotrophy, msbB⁻, ansB⁻, and any other modifications described elsewhere herein or known to those of skill in the art, accumulate in the tumor microenvironment (TME) and infect tumor-resident immune cells (myeloid cells). The immunostimulatory bacteria contain plasmids, encoding complementary therapeutic products, under control of a promoter or promoters recognized by the host, and any other desired regulatory sequences recognized in a eukaryotic, such as a human, or other animal, or mammalian, subject, to effect expression of the encoded products, and, also, secretion of the products. The immunostimulatory bacteria accumulate in the TME, particularly in tumor-resident immune cells, including myeloid-derived suppressor cells (MDSCs), tumor-associated macrophages (TAMs), and dendritic cells (DCs), where the encoded therapeutic products are expressed and then secreted into the tumor microenvironment to achieve an anti-tumor effect. By appropriate combination of products, the anti-tumor effect can be enhanced by virtue of interactions of the various products with the host immune system.

[1074] As discussed elsewhere herein, the immunostimulatory bacteria, containing plasmids encoding therapeutic products, with a single promoter and open reading frame (ORF), can express two (or more) proteins through the use of viral internal ribosomal entry sites (IRES), which are cap-independent, or through translational read-through of 2A peptides (e.g., T2A, P2A, E2A, or F2A), and subsequent self-cleavage into equally expressed co-proteins. Alternatively, the genetic payloads/therapeutic products can be expressed using dual or multiple promoter constructs, where each protein is expressed under the control of a separate promoter. A combination of single and dual/multiple promoter constructs, to express three or more proteins, also can be included on the plasmids. Generally, the nucleic acids encoding the therapeutic products are under the control of RNA polymerase II promoters. For example, promoters include, but are not limited to EF-1α, CMV, SV40, UBC, CBA, PGK, GUSB, GAPDH, EIF41A, CAG, CD68, and synthetic MND promoters. The plasmids can contain other regulatory elements, such as post-transcriptional regulatory elements (PREs; e.g., WPRE, HPRE), polyadenylation signal sequences, terminators, enhancers, secretion signals (also known as signal peptides/sequences, leader peptides/sequences), DNA nuclear targeting sequences (DTS), and other regulatory elements, described elsewhere herein or known to those of skill in the art that can enhance or increase the expression and/or secretion of the encoded therapeutic products.

[1075] The genetic payloads, or therapeutic products, encoded on the plasmids include immunostimulatory proteins, such as cytokines, chemokines, and co-stimulatory molecules; cytosolic DNA/RNA sensors that induce type I IFN and gain-of-function/constitutively active mutants/variants thereof, antibodies and fragments thereof; bi-specific T-cell engagers (BiTEs®); soluble TGF-β receptors that act as decoys for binding TGF-β, or TGF-β antagonizing polypeptides; IL-6 binding decoy receptors; interfering RNAs (e.g., siRNA, shRNA, miRNA); and other therapeutic products as discussed below and elsewhere herein, and as known in the art; and complementary combinations of all of the preceding therapeutic products. In some embodiments, the cytokines can be encoded on the plasmid within the immunostimulatory bacteria, with a membrane anchoring motif, such as a transmembrane domain, and a collagen-binding domain.

[1076] The immunostimulatory proteins, including cytokines, chemokines, and co-stimulatory molecules, that can be encoded on the plasmids include, but are not limited to, IL-2, IL-7, IL-12p70 (IL-12p40+IL-12p35), IL-15, IL-15/IL-15Rα chain complex, IL-18, IL-21, IL-23, IL-36 gamma, interferon-α, interferon-β, IL-2 that has attenuated binding to IL-2Ra, IL-2 that is modified so that it does not bind to IL-2Ra, CXCL9, CXCL10, CXCL11, CCL3, CCL4, CCL5, proteins that are involved in or that effect or potentiate the recruitment and/or persistence of T-cells, CD40, CD40 ligand (CD40L), OX40, OX40 ligand (OX40L), 4-1BB, 4-1BB Ligand (4-1BBL), 4-1BBL with a deletion in the cytoplasmic domain (4-1BBLΔcyt), ICOS, CD27, members of the B7-CD28 family, and members of the tumor necrosis factor receptor (TNFR) superfamily. The immunostimulatory proteins also include truncated co-stimulatory molecules, such as, for example, 4-1BBL, CD80, CD86, CD27L, B7RP1 and OX40L, with a cytoplasmic domain deletion, for expression on an antigen-presenting cell (APC), where the truncated gene product is capable of constitutive immunostimulatory signaling to a T-cell through co-stimulatory receptor engagement, and is unable to counter-regulatory signal to the APC due to a deleted cytoplasmic domain.

[1077] The cytosolic DNA/RNA sensors, that induce or activate type I IFN production include, but are not limited to, STING, RIG-I, MDA5, IRF3, IRF5, and IRF7, and gain-of-function (GOF) or constitutively active variants thereof. Other proteins involved in the recognition of DNA/RNA that activate type I IFN responses, that can be mutated to generate constitutive type I IFN expression and can be encoded on the plasmids, include, but are not limited to, TRIM56, RIP1, Sec5, TRAF2, TRAF3, TRAF6, STAT1, LGP2, DDX3, DHX9, DDX1, DDX21, DHX15, DHX33, DHX36, DDX60, and SNRNP200.

[1078] Other therapeutic products that can be encoded on the plasmids delivered by the immunostimulatory bacteria herein, or that can be co-administered with the bacteria, that enhance or increase the anti-tumor response, include, but are not limited to, antibodies and fragments thereof, for example, TGF-β inhibitory antibodies; anti-IL-6 antibodies; antibodies against checkpoint inhibitors, such as PD-1, PD-L1, and CTLA-4; and antibodies against, or inhibitors of, VEGF, CD73, CD38, Siglec-15, EGFR, Her2, Mesothelin, and BCMA. Also contemplated for expression on the plasmid, or for co-administration with the immunostimulatory bacteria herein, are bispecific T-cell engagers (BiTEs®), IL-6 binding decoy receptors, TGF-beta binding decoy receptors, and TGF-beta polypeptide antagonists. Any of these antibodies, inhibitors or decoy receptors can be co-administered with the immunostimulatory bacteria herein. In some embodiments, PARP (poly (ADP)-ribose polymerase) inhibitors, histone deacetylase (HDAC) inhibitors, and/or chemotherapy, also can be co-administered with any of the therapeutic products listed above, alone, or in any combination.

[1079] Exemplary of complementary combinations of therapeutic products that can be encoded on the plasmids in the immunostimulatory bacteria herein include, but are not limited to:
[1080] IL-2 and IL-12p70; IL-2 and IL-21; IL-2, IL-12p70, and a STING GOF variant; IL-2, IL-21, and a STING GOF variant; IL-2, IL-12p70, a STING GOF variant, and 4-1BBL (including 4-1BBLΔcyt); and IL-2, IL-21, a STING GOF variant, and 4-1BBL (including 4-1BBLΔcyt);
[1081] IL-15/IL-15Rα and a STING GOF variant; IL-15/IL-15Rα, a STING GOF variant, and 4-1BBL (including 4-1BBLΔcyt); IL-15/IL-15Rα and IL-12p70; IL-15/IL-15Rα, and IL-21; IL-15/IL-15Rα, IL-12p70, and a STING GOF variant; IL-15/IL-15Rα, IL-21, and a STING GOF variant; IL-15/IL-15Rα, IL-12p70, a STING GOF variant, and 4-1BBL (including 4-1BBLΔcyt); and IL-15/IL-15Rα, IL-21, a STING GOF variant, and 4-1BBL (including 4-1BBLΔcyt);
[1082] IL-12p70 and IL-21; IL-12p70, IL-21 and a STING GOF variant; IL-12p70, IL-21, a STING GOF variant, and 4-1BBL (including 4-1BBLΔcyt); IL-12p70 and a STING GOF variant; IL-12p70, a STING GOF variant, and 4-1BBL (including 4-1BBLΔcyt); IL-12p70 and IL-18; IL-12p70, IL-18 and a STING GOF variant; and IL-12p70, IL-18, a STING GOF variant, and 4-1BBL (including 4-1BBLΔcyt);
[1083] a TGF-β decoy receptor, IL-2, and IL-12p70; a TGF-β decoy receptor, IL-2, and IL-21; a TGF-β decoy receptor, IL-2, IL-12p70, and a STING GOF variant; a TGF-β decoy receptor, IL-2, IL-21, and a STING GOF variant; a TGF-β decoy receptor, IL-2, IL-12p70, a STING GOF variant, and 4-1BBL (including 4-1BBLΔcyt); and a TGF-β decoy receptor, IL-2, IL-21, a STING GOF variant, and 4-1BBL (including 4-1BBLΔcyt);
[1084] a TGF-β decoy receptor, IL-15/IL-15Rα, and a STING GOF variant; a TGF-β decoy receptor, IL-15/IL-15Rα, a STING GOF variant, and 4-1BBL (including 4-1BBLΔcyt); a TGF-β decoy receptor, IL-15/IL-15Rα, and IL-12p70; a TGF-β decoy receptor, IL-15/IL-15Rα, and IL-21; a TGF-β decoy receptor, IL-15/IL-15Rα, IL-12p70, and a STING GOF variant; a TGF-β decoy receptor, IL-15/IL-15Rα, IL-21, and a STING GOF variant; a TGF-β decoy receptor, IL-15/IL-15Rα, IL-12p70, a STING GOF variant, and 4-1BBL (including 4-1BBLΔcyt); and a TGF-β decoy receptor, IL-15/IL-15Rα, IL-21, a STING GOF variant, and 4-1BBL (including 4-1BBLΔcyt);
[1085] a TGF-β decoy receptor, IL-12p70, and IL-21; a TGF-β decoy receptor, IL-12p70, IL-21, and a STING GOF variant; a TGF-β decoy receptor, IL-12p70, IL-21, a STING GOF variant, and 4-1BBL (including 4-1BBLΔcyt); a TGF-β decoy receptor and IL-12p70; a TGF-β decoy receptor, IL-12p70, and a STING GOF variant; a TGF-β decoy receptor, IL-12p70, a STING GOF variant, and 4-1BBL (including 4-1BBLΔcyt); a TGF-β decoy receptor, IL-12p70, and IL-18; a TGF-β decoy receptor, IL-12p70, IL-18, and a STING GOF variant; a TGF-β decoy receptor, IL-12p70, IL-18, a STING GOF variant, and 4-1BBL (including 4-1BBLΔcyt); and a TGF-β decoy receptor and a STING GOF variant;
[1086] an anti-CTLA-4 antibody, IL-2, and IL-12p70; an anti-CTLA-4 antibody, IL-2, and IL-21; an anti-CTLA-4 antibody, IL-2, IL-12p70, and a STING GOF variant; an anti-CTLA-4 antibody, IL-2, IL-21, and a STING GOF variant; an anti-CTLA-4 antibody, IL-2, IL-12p70, a STING GOF variant, and 4-1BBL (including 4-1BBLΔcyt); and an anti-CTLA-4 antibody, IL-2, IL-21, a STING GOF variant, and 4-1BBL (including 4-1BBLΔcyt);
[1087] an anti-CTLA-4 antibody, IL-15/IL-15Rα, and a STING GOF variant; an anti-CTLA-4 antibody, IL-15/IL-15Rα, a STING GOF variant, and 4-1BBL (including 4-1BBLΔcyt); an anti-CTLA-4 antibody, IL-15/IL-15Rα, and IL-12p70; an anti-CTLA-4 antibody, IL-15/IL-15Rα, and IL-21; an anti-CTLA-4 antibody, IL-15/IL-15Rα, IL-12p70, and a STING GOF variant; an anti-CTLA-4 antibody, IL-15/IL-15Rα, IL-21, and a STING GOF variant; an anti-CTLA-4 antibody, IL-15/IL-15Rα, IL-12p70, a STING GOF variant, and 4-1BBL (including 4-1BBLΔcyt); and an anti-CTLA-4 antibody, IL-15/IL-15Rα, IL-21, a STING GOF variant, and 4-1BBL (including 4-1BBLΔcyt);
[1088] an anti-CTLA-4 antibody, IL-12p70, and IL-21; an anti-CTLA-4 antibody, IL-12p70, IL-21, and a STING GOF variant; an anti-CTLA-4 antibody, IL-12p70, IL-21, a STING GOF variant, and 4-1BBL (including 4-1BBLΔcyt); an anti-CTLA-4 antibody and IL-12p70; an anti-CTLA-4 antibody, IL-12p70, and a STING GOF variant; an anti-CTLA-4 antibody, IL-12p70, a STING GOF variant, and 4-1BBL (including 4-1BBLΔcyt); an anti-CTLA-4 antibody, IL-12p70, and IL-18; an anti-CTLA-4 antibody, IL-12p70, IL-18, and a STING GOF variant; an anti-CTLA-4 antibody, IL-12p70, IL-18, a STING GOF variant, and 4-1BBL (including 4-1BBLΔcyt); and an anti-CTLA-4 antibody and a STING GOF variant;
[1089] a CD40 agonist, IL-2, and IL-12p70; a CD40 agonist, IL-2, and IL-21; a CD40 agonist, IL-2, IL-12p70, and a STING GOF variant; a CD40 agonist, IL-2, IL-21, and a STING GOF variant; a CD40 agonist, IL-2, IL-12p70, a STING GOF variant, and 4-1BBL (including 4-1BBLΔcyt); and a CD40 agonist, IL-2, IL-21, a STING GOF variant, and 4-1BBL (including 4-1BBLΔcyt);
[1090] a CD40 agonist, IL-15/IL-15Rα, and a STING GOF variant; a CD40 agonist, IL-15/IL-15Rα, a STING GOF variant, and 4-1BBL (including 4-1BBLΔcyt); a CD40 agonist, IL-15/IL-15Rα, and IL-12p70; a CD40 agonist, IL-15/IL-15Rα, and IL-21; a CD40 agonist, IL-15/IL-15Rα, IL-12p70, and a STING GOF variant; a CD40 agonist, IL-15/IL-15Rα, IL-21, and a STING GOF variant; a CD40 agonist, IL-15/IL-15Rα, IL-12p70, a STING GOF variant, and 4-1BBL (including 4-1BBLΔcyt); and a CD40 agonist, IL-15/IL-15Rα, IL-21, a STING GOF variant, and 4-1BBL (including 4-1BBLΔcyt); and
[1091] a CD40 agonist, IL-12p70, and IL-21; a CD40 agonist, IL-12p70, IL-21, and a STING GOF variant; a CD40 agonist, IL-12p70, IL-21, a STING GOF variant, and 4-1BBL (including 4-1BBLΔcyt); a CD40 agonist and IL-12p70; a CD40 agonist, IL-12p70, and a STING GOF variant; a CD40 agonist, IL-12p70, a STING GOF variant, and 4-1BBL (including 4-1BBLΔcyt); a CD40 agonist, IL-12p70, and IL-18; a CD40 agonist, IL-12p70, IL-18, and a STING GOF variant; a CD40 agonist, IL-12p70, IL-18, a STING GOF variant, and 4-1BBL (including 4-1BBLΔcyt); and a CD40 agonist and a STING GOF variant.

[1092] The following table lists exemplary products that can be encoded in plasmids in the immunostimulatory bacteria, and some effects/characteristics of such products, including synergistic effects of the combination of the IL-15 or IL-15 complex, discussed and demonstrated in the Examples.

| Encoded Product | Effects/Characteristics |
|---|---|
| Engineered | Chemokine gradients recruit T-cells. |
| STING-to | Induction of Type I IFN, T-cell activation, APC tumor |
| increase Type I | antigen cross-presentation. |
| IFN expression | Constitutive STING variants validated in SAVI patients |
| | with Type I Interferonopathies. |
| IL-12 | Strong Th1 immune response driver. |
| | Produced by activated APCs, particularly M1 |
| | Macrophages and DCs* |
| | Data indicate that it is a strong driver of IFN-γ |
| IL-15 and/or | Stimulates T-cell and NK cell proliferation |
| IL-15 complex | Lacks Treg stimulation seen with IL-2. |
| (IL-15Rα-IL- | |
| 15sc) | |
| IL-21 | Pleiotropic cytokine that stimulates T-cells and NK cells. |
| | Converts M2 macrophages to M1 macrophages. |
| | Produced upon TLR3 activation (RNA viral sensing). |
| IL-36γ | Promotes Th1 APCs and IFN-γ production by T-cells, |
| | NK cells and γδT-cells. |
| Modified 4- | Provides T-cell co-stimulation, improves cytotoxicity |
| 1BBL | and memory phenotype of T-cells; modified with |
| | deletion or truncation of the cytoplasmic domain, and |
| | addition of extra positive residues to the N-terminal |
| | truncated cytoplasmic domain. |
| Anti-CTLA-4 | Enhances T-cell priming and activation against |
| scFV-Fc | weaker tumor antigens. |
| TGF-β Decoy | Binds and removes TGF-beta, relieves |
| Receptor Trap | immunosuppression of T-cells and Th1 APCs. |

*DC = Dendritic Cells

[1093] In any of the complementary combinations above, a TGF-β decoy receptor can be replaced with a TGF-β antagonizing polypeptide. As discussed above, TGF-β decoy receptors are any that act as decoys for binding TGF-β to remove it, or are TGF-β antagonizing polypeptides (e.g., anti-TGF-beta antibodies or antibody fragments, and anti-TGF-beta receptor antibodies or antibody fragments). The STING protein or other DNA/RNA sensor that induces or activates type I IFN production, can be a GOF/constitutively active variant, or can be the wild-type protein, including the modified STING polypeptides and chimeric STING polypeptides described and provided herein. Any of the complementary combinations above also can be administered in combination with any one or more of: an anti-PD-1 antibody, an anti-CTLA-4 antibody, an anti-PD-L1 antibody, an anti-IL-6 antibody, an anti-Siglec-15 antibody, an anti-VEGF antibody, an anti-CD73 antibody, an anti-CD38 antibody, an anti-EGFR antibody, an anti-Her2 antibody, an anti-Mesothelin antibody, an anti-BCMA antibody, and antibody fragments thereof, as well as PARP inhibitors, HDAC inhibitors, or chemotherapy, and combinations thereof.

[1094] Plasmids and immunostimulatory bacteria provided herein encode combinations of therapeutic payloads. These include combinations of nucleic acid encoding any or all of the products listed in the table above. Combinations of complementary payloads were assessed, and exemplary combinations and their effects are described in the Examples. The effects of various combinations of payloads on the activation of antigen-specific T-cells, and on the secretion of CXCL10 by myeloid cells, a key chemokine involved in the recruitment of anti-tumor T-cells, were assessed. For example, combinations of the payloads can induce strong secretion of CXCL10 by bone marrow dendritic cells (BMDCs). Combining IL-36γ with IL-12p70 and STING R284G tazCTT led to higher secretion of CXCL10 and IFN-γ by BMDCs. Many of the combinations induce the activation of CD8⁺ T-cell responses (e.g., 4-1BB expression), and the secretion of IFN-γ. Particular cytokine combinations can activate T-cells. For example, the combinations of IL-12p70+IL-15; IL-12p70+IL-15+IFN-α2; IL-12p70+IL-15+anti-4-1BB agonistic antibody; IL-12p70+IL-15+IL-36γ; IL-12p70+IL-15+IL-21; IL-12p70+IL-21+IL-36γ; IL-12p70+IL-36γ+IFN-α2; IL-12p70+IL-36γ+anti-4-1BB agonistic antibody; IL-15+IL-36γ+IFN-α2; and IL-15+IL-36γ+anti-4-1BB agonistic antibody, result in the secretion of high levels of IFN-γ, but relatively low levels of IL-6, from T-cells, making them ideal combinations for optimal T-cell activation, for the induction of anti-tumor immunity in the tumor microenvironment.

[1095] Additionally, several combinations of cytokines (IL-15/IL-15R alpha chain complex, IL-12, IL-12p70, IL-15, IL-21, and IL-36γ) and 4-1BB engagement, activate T-cells to secrete high levels of IFN-γ, with and without TCR stimulation by an anti-CD3ε agonistic antibody, for CD4⁺ and CD8⁺ T-cells. STING variants described herein as well as IL-12 can increase antigen specific activation of human CD8⁺ T-cells. Data also showed, in a mouse (mu) model of colorectal carcinoma, that immunostimulatory bacterial strains, expressing IL-15, or the combination of 4-1BBLΔcyt+IL-12 more potently inhibit tumor growth inhibition that the same strains expressing 4-1BBL(Δcyt) or IL-12 alone, and result in a high complete response rate (50% cure rate). Other combinations also were tested and shown to have potent anti-tumor activity in vivo.

[1096] Combinations of payloads can include a co-stimulatory molecule, such as an OX40L polypeptide, or a 4-1BBL polypeptide, or one of the cytoplasmic deleted or truncated variants thereof, and/or the modified forms thereof described and exemplified herein; or an anti-immune checkpoint antibody or fragment thereof, such as an anti-CTLA-4 scFv-Fc or an anti-CTLA-4 scFv (see, Example 25 and SEQ ID NOs:428 and 429, respectively); one or more cytokines/chemokines, such as IL-12, IL-15, IL-18, IL-21, IL-23, IL-36γ, IFN-β, IFN-α2, and CXCL10; TGF-β binding decoy receptors and other TGF-beta polypeptide antagonists, such as, for example, a human soluble TGFβ receptor II fused with a human IgG1 Fc (hu sTGFβRII-Fc; SEQ ID NO:437), anti-TGF-beta antibodies or antibody fragments, anti-TGF-beta receptor antibodies or antibody fragments, and soluble TGF-beta antagonist polypeptides; and one or more of a STING protein or a modified and/or chimeric STING protein, as described and exemplified herein.

[1097] Payloads/products/polypeptides can be encoded as a polycistronic construct, under the control of a single promoter (i.e., a single promoter system) and, as required, other regulatory sequences, and also can include 2A polypeptides or other such polypeptides that result in the translation of individual products. The payloads also can be expressed on plasmids containing two separate open reading frames (ORFs), each under the control of a different promoter (i.e., a dual promoter system). Exemplary combinations of payloads, in the order they are encoded on a plasmid, and including the 2A peptide that is encoded in the polycistronic construct, are set forth in the following table. The table includes the 2A peptide, but other such peptides can be substitute and/or products can be separately encoded.

### Exemplary Combinations of Products and Exempla Order on the Plasmids

| 1^{st} Encoded | 1^{st} 2A | 2^{nd} Encoded | 2^{nd} 2A | 3^{rd} Encoded | 3^{rd} 2A | 4^{th} Encoded |
|---|---|---|---|---|---|---|
| Product | Peptide | Product | Peptide | Product | Peptide | Product |
| 4-1BBL* | T2A | IL-12p70 | | | | |
| 4-1BBL* | T2A | Chimeric | | | | |
| | | STING** | | | | |
| 4-1BBL* | T2A | IL-12p70 | P2A | Chimeric | | |
| | | | | STING** | | |
| IL-12p70 | T2A | Chimeric | | | | |
| | | STING** | | | | |
| IL-12p70 | T2A | IL-15 | | | | |
| IL-12p70 | T2A | IL-21 | | | | |
| IL-12p70 | T2A | IL-15 | | | | |
| IL-12p70 | T2A | IL-21 | | | | |
| IL-21 | T2A | IL-12p70 | | | | |
| IL-12p70 | T2A | IL-36γ | | | | |
| IL-36γ | T2A | IL-12p70 | | | | |
| 4-1BBL* | T2A | IL-12p70 | P2A | IL-15 | | |
| 4-1BBL* | T2A | IL-12p70 | P2A | IL-21 | | |
| 4-1BBL* | T2A | IL-12p70 | P2A | IL-36γ | | |
| 4-1BBL* | T2A | IL-12p70 | P2A | IL-15 | T2A | Chimeric |
| | | | | | | STING** |
| 4-1BBL* | T2A | IL-12p70 | P2A | IL-21 | T2A | Chimeric |
| | | | | | | STING** |
| 4-1BBL* | T2A | IL-12p70 | P2A | IL-36γ | T2A | Chimeric |
| | | | | | | STING** |
| IL-12p70 | T2A | IL-21 | P2A | Chimeric | | |
| | | | | STING** | | |
| IL-21 | T2A | IL-12p70 | P2A | Chimeric | | |
| | | | | STING** | | |
| IL-12p70 | T2A | IL-15 | P2A | Chimeric | | |
| | | | | STING** | | |
| IL-12p70 | T2A | IL-36γ | P2A | Chimeric | | |
| | | | | STING** | | |
| IL-36γ | T2A | IL-12p70 | P2A | Chimeric | | |
| | | | | STING** | | |
| Anti-CTLA-4 | T2A | IL-12p70 | | | | |
| scFv-Fc | | | | | | |
| Anti-CTLA-4 | T2A | IL-12p70 | P2A | Chimeric | | |
| scFv-Fc | | | | STING** | | |
| Anti-CTLA-4 | T2A | IL-12p70 | P2A | IL-15 | T2A | |
| scFv-Fc | | | | | | |
| Anti-CTLA-4 | T2A | IL-12p70 | P2A | IL-21 | T2A | |
| scFv-Fc | | | | | | |
| Anti-CTLA-4 | T2A | IL-12p70 | P2A | IL-36γ | T2A | |
| scFv-Fc | | | | | | |
| 4-1BBL* | T2A | STGFβRIIFc^{#} | | | T2A | |
| STGFβRIIFc^{#} | T2A | IL-12p70 | P2A | Chimeric | | |
| | | | | STING** | | |
| 4-1BBL* | T2A | sTGFβRIIFc^{#} | P2A | IL-12p70 | T2A | |
| 4-1BBL* | T2A | IL-12p70 | P2A | sTGFβRIIFc^{#} | T2A | |
| IL-36γ | T2A | IL-23 | P2A | OX40L | | |

*4-1BBL = the modified 4-1BBL with the cytoplasmic truncation and residue modifications to render the remaining cytoplasmic domain more positive to retain correct orientation with respect to the cell membrane.
**Chimeric STING = STING with the Tasmanian Devil CTT and the replacements R284G/N154S.
sTGFβRIIFc^{#} = type II receptor betaglycan.

[1099] Other combinations of products are contemplated (see discussions above and Examples). Other such combinations of interest include any of the modified STING proteins and a cytokine, such as a chimeric STING, such as the human chimera with the Tasmanian Devil CTT, and particularly with one or more gain-of-function mutations, such as N154S/R284G. The complementary combinations, discussed herein, can provide synergistic results. For example, the combination of the chimeric STING polypeptide and IL-15/IL-15R alpha chain complex (IL-15Rα-IL-15sc), shown in the Examples, acts synergistically to improve anti-tumor effectiveness.

[1100] The properties of the immunostimulatory bacteria provided herein, such as the accumulation in tumor-resident myeloid cells, and in the TME, and the combinations of products/payloads that can be expressed, can be selected to cover the cancer immunity cycle. Each step in the cycle, and the role of the immunostimulatory bacteria and payloads is summarized as follows:
[1101] 1) Release of cancer cell antigens—the immunostimulatory bacteria accumulate in the tumor-resident myeloid cells;
[1102] 2) Cancer antigen presentation—the immunostimulatory bacteria provided herein encode and express immune stimulators, such as the STING polypeptides and variants thereof, and IL-12, leading to the expression of type I interferons, including IFN-α and IFN-β;
[1103] 3) Priming and activation—the immunostimulatory bacteria encode the STING polypeptides and variants thereof, and the co-stimulatory proteins, such as 4-1BBL, and IL-12;
[1104] 4) Trafficking of the T-cells to the tumor—the encoded STING variants are expressed, leading to the consequent expression of IFN-α and IFN-β;
[1105] 5) Infiltration of T-cells into the tumor—vascular leakage and repolarization of immunosuppressive myeloid cells;
[1106] 6) Cancer cell recognition by T-cells—Type I IFN, and IFNγ, and upregulation of MHC; and
[1107] 7) Killing of cancer cells—the combination of encoded cytokines/chemokines, such as IL-12, IL-15, IL-15/IL-15R alpha chain complex (IL-15Rα-IL-15sc), IL-21, and/or IL-36γ, which induce T-cell proliferation and release of IFN-γ, and the expression of a soluble TGF-β decoy receptor.

[1108] A skilled person, based on the disclosure herein and their knowledge, can identify other product payload combinations and other orders of the products as encoded on a polycistronic construct, that have immune-activating and/or immune suppressing effects, to enhance the anti-tumor activities of the immunostimulatory bacteria provided herein.

### E. Immunostimulatory Bacteria as Antiviral Therapeutics and as Therapeutics Against Other Infectious Pathogens

[1109] Immunosuppression of a host immune response plays a role in many infectious diseases, and particularly, in persistent viral infection, as well as in tumor immunosuppression. In persistent infections, the virus remains in specific cells of infected individuals. There are several types of persistent virus-host interactions: latent, chronic, and slow infections. In latent infections, there is no detectable infectious virus between episodes of recurrent disease; in chronic infections, there is continued presence of infectious virus following a primary infection, and there is chronic or recurrent disease. Slow infection is characterized by a prolonged incubation period, followed by progressive disease. During persistent infections, the viral genome can be stably integrated into the cellular DNA, or can be maintained episomally. Persistent infection occurs with numerous viruses and infectious agents, including, but not limited to, human T-cell leukemia viruses, Epstein-Barr virus, cytomegalovirus, herpesviruses, varicella zoster virus, measles virus, papovaviruses, prions, hepatitis viruses (including types A, B, C, D, and E), adenoviruses, parvoviruses, coronaviruses, human immunodeficiency virus (HIV), smallpox viruses, poliovirus, influenza viruses, rotaviruses, yellow fever virus, mumps virus, rubella virus, and papillomaviruses.

[1110] Bacteria have been used as delivery vehicles for vaccines and other anti-pathogen therapeutics, and have been used as vaccines for eliciting an immune response against a peptide that is foreign to the bacterial vector. For example, an S. typhi TY21a strain, containing a VEGFR2-encoding plasmid, induces VEGFR2-specific T-cell responses in humans (see, e.g., Schmitz-Winnenthal et al. (2016) Journal of Clinical Oncology 34(15_suppl):3091-3091, DOI: 10.1200/JCO.2016.34.15_suppl.3091). The prior approaches using bacteria as vaccine vehicles, however, have had limited clinical success. The FDA-approved bacterially-based vaccines only are for use against other bacterial diseases, and have not effectively induced anti-tumor or antiviral immunity in humans. As discussed herein, the immunostimulatory bacteria provided herein address these problems.

[1111] One way in which antiviral vaccines work is by delivering antigens that induce antibodies that are specific for the surface glycoproteins of enveloped viruses, or that are specific for the capsid proteins of non-enveloped viruses. Antibodies are the primary element of adaptive immunity, which is designed to pre-exist at protective levels, and to be present or induced during re-exposure to a viral pathogen. Pre-existing antibodies act with the speed of innate immunity, but with more specificity, higher avidity, and targeted functionality. An immunological goal for immunization is the induction of durable protective antibody responses. Protective antibody responses generally work best when they are neutralizing and inhibit infection. Neutralization can occur by three major mechanisms. A first mechanism, aggregation or immobilization of the virus, reduces the infectious inoculum by preventing the virus from reaching the target cell. A second mechanism involves an antibody directly blocking the attachment of the virus to a target cell, by blocking the receptor-binding domain. The third mechanism, neutralization, can occur post-attachment of the virus to a target cell, by preventing entry of the virus into the cell, or by uncoating through fusion inhibition. Neutralizing antibodies need to recognize oligomeric surface proteins in their native state, or in intermediate forms that may be transiently present before completion of the fusion process. These epitopes are generally conformational, and are often quaternary epitopes, and are not often present on monomeric forms of viral proteins.

[1112] Although antibodies are recognized as the primary mechanism of vaccine-induced protective immunity, virus-specific CD8⁺ T-cell responses also are important for controlling virus infection, and for limiting the severity of disease (see, e.g., Graham (2013) Immunol. Rev. 255(1):230-242). Antibody-mediated effector mechanisms are for preventing infection; CD8⁺ T-cell-mediated effector mechanisms are for recognizing and clearing virus-infected cells. Since the immunostimulatory bacteria provided herein infect myeloid cells, the immunostimulatory bacteria can enhance antigen presentation to T-cells, inducing T-cell mediated responses. Antigen-specific cytotoxic T-lymphocytes (CTLs) are a sub-group of CD8⁺ T-cells that are activated by interaction with antigens that are presented on the cell surface in a complex with major histocompatibility complex class I (MHC I), which is the presentation pathway for cytosolic proteins of mammalian cells. Antigens are synthesized by bacterial pathogens, or bacterial vaccines release antigens into the cytoplasm, eliciting the cellular immune response by CTLs. Following this activation, CTLs are directed against infected cells that display the relevant antigenic peptides in complex with MHC I. Antigens also can be directly presented by MHC class II molecules on APCs (antigen-presenting cells) to CD4⁺ helper cells, which can promote B-cell production of antibodies.

[1113] A limitation of prior bacterial vaccine and anti-pathogen strategies is that they rely on bacterial sensing pathways as adjuvants, which, as described herein, do not lead to strong adaptive antiviral or anti-tumor immunity. The immunostimulatory bacteria provided herein address these limitations. The immunostimulatory bacteria provided herein provide for the priming of heterologous proteins, including viral antigens, and other antiviral therapeutics, in the context of strong viral-sensing immune pathways, leading to effective antiviral vaccination, and also, to anti-tumor treatments. As detailed herein, the immunostimulatory bacteria provided herein lack many of the bacterial TLR sensing pathways, and eliminate the skewing of immunity towards innate antibacterial responses, while retaining antiviral pathways. During viral infection, as well as in subjects with cancer, innate immune signaling pathways, including toll-like receptors (TLRs), retinoic acid inducible gene-I (RIG-I)-like receptors (RLRs), and cytoplasmic DNA sensors, are activated for the synthesis of antiviral molecules, such as type I interferons (IFNs) and pro-inflammatory cytokines. The immunostimulatory bacteria provided herein are designed to stimulate such pathways by virtue of the genomic modifications, and also, the encoded therapeutic cargo(es), such as the STING proteins and modified STING proteins, cytokines, and chemokines.

[1114] The immunostimulatory bacteria provided herein advantageously, by virtue of genomic modifications, and, optional encoded therapeutic products, can direct the host immune response to be antiviral in nature. The immunostimulatory bacteria provided herein, as discussed, infect myeloid cells to deliver encoded anti-pathogen therapeutic products, such as antigens, antibodies, and other encoded therapeutics, and can encode additional products, such as immunostimulatory proteins, to enhance a host's immune response. Thus, the immunostimulatory bacteria can provide a variety of attacks on pathogens.

[1115] The immunostimulatory bacteria provided herein, in subjects who have a tumor, accumulate in tumor-resident immune cells. In subjects who do not have a tumor, the bacteria primarily, or only, infect phagocytic antigen-presenting cells (APCs), which are cells that are very capable of transferring plasmids that can be read by the eukaryotic machinery, and produce proteins in their natural context. The plasmids encode single or multiple heterologous proteins, including, for example, viral antigens and other antiviral therapeutics, and also, can encode single or multiplexed immune payloads that induce antiviral immune-sensing pathways. The result is proper APC activation and antigen priming of T-cells, leading to durable humoral and cellular antiviral immunity, even in chronic infection environments, where suppressive myeloid cells prevent adaptive immunity.

[1116] Hence, provided herein are immunostimulatory bacteria that deliver protein antigens and antibodies, and other therapeutics for vaccination against pathogens, or for the treatment of resulting infections, including persistent viral infections. The pathogens include bacteria, protozoans, viruses, and prions, and other prion-like particles that cause diseases and disorders. Among the immunostimulatory bacteria, and exemplary of such bacteria, are strains/species of Salmonella, such as S. typhimurium. The immunostimulatory bacteria can encode the anti-pathogen products under control of a bacterial or a eukaryotic promoter. The promoter can be constitutive or can be inducible. Selection of the promoter, and other regulatory sequences, depends upon factors that include the particular product, the timing of expression of the product, and the use of the bacteria, such as whether they are for the treatment of an existing infection, or are for vaccination. The bacteria, which generally are asd⁻, can encode asd on the plasmid to permit replication upon infection of the host cells with the bacteria, without any need for an antibiotic selection cassette. This permits the bacteria to replicate in vivo. As an alternative, a suicide system can be used to deliver payloads, (i.e., therapeutic products) to tissue-resident myeloid cells. In this context, the bacteria are dosed in vivo using an asd⁻ strain that lacks a plasmid containing a complementing asd gene cassette. In vitro, diaminopimelic acid (DAP) is added to facilitate bacterial replication in the absence of a functional asd gene; such bacteria cannot grow in vivo. One bolus of the bacterial nucleic acid is delivered to tissue-resident myeloid cells after phagocytosis and intracellular destruction of the bacteria.

[1117] The immunostimulatory bacteria provided herein, including Salmonella, specifically target myeloid cells, including antigen-presenting cells (APCs), in the infected organism. APCs can migrate into lymph nodes, the spleen, and liver, providing presentation of expressed antigens to lymph node resident T-cells. The bacteria can be taken up by dendritic cells, which then express the antigens for the presentation pathway by MHC I and MHC IL, and in turn, initiate specific T-cell responses. The immunostimulatory bacteria provided herein can exploit these pathways when used as vaccines, or to encode viral antigens and/or other proteins to protect against pathogens, such as influenza viruses, Ebola virus, Severe Acute Respiratory Syndrome coronavirus (SARS-CoV), Middle East Respiratory Syndrome coronavirus (MERS-CoV), and Severe Acute Respiratory Syndrome coronavirus 2 (SARS-CoV-2, which causes COVID-19), Porphyromonas gingivalis (P. gingivalis), and others as set forth herein and/or as known to those of skill in the art. Targets include proteins, such as the spike protein of the coronaviruses (see, e.g., SEQ ID NO:438), and gingipain protease of Porphyromonas gingivalis (see, e.g., SEQ ID NOs: 442-447), particularly the lysine-gingipain protease (Kgp or Lys-gingipain) from P. gingivalis strain ATCC 332277 (see, e.g., SEQ ID NO:444), and lysine-gingipain proteases from other strains of Porphyromonas gingivalis, including strains 83, FDC381, and HG66 (see, e.g., SEQ ID NOs: 445-447, respectively). Bacterial pathogens include, for example, species of Escherichia, Klebsiella, Staphylococcus, Acinetobacter, and Pseudomonas, particularly drug-resistant species and strains. Those of skill in the art readily can identify antigens to target. For anti-tumor applications, tumor antigens (see, e.g., the Examples for exemplary tumor antigens), and proteases, reverse transcriptases (for RNA viruses), and DNA polymerases, and other replicative enzymes, can be targets. Exemplary species of pathogenic bacteria, include, but are not limited to: E. coli, S. aureus, P. aeruginosa, K. pneumoniae, E. faecalis, and S. pneumoniae.

[1118] Severe acute respiratory syndrome coronavirus 2 (SARS-CoV-2) is a novel beta-coronavirus that is the causative agent of the coronavirus disease 2019 (COVID-19) pandemic. Coronavirus virions contain a self-surface spike (S) glycoprotein that binds to host cell angiotensin-converting enzyme 2 (ACE2) receptors, and mediates entry via fusion of the host and viral membranes. The binding of the SARS-CoV-2 spike protein to the ACE2 receptor causes a larger conformational rearrangement of spike protein, from a metastable pre-fusion conformation, to a highly stable post-fusion conformation, which facilitates membrane fusion. Because it mediates cell attachment and entry, the spike (S) protein is essential for the viral life cycle, and is a primary target for neutralizing antibodies, and is a critical vaccine antigen (see, e.g., Hsieh et al. (2020) Science 369:1501-1505).

[1119] SARS-COV2 virus proteins that draw the best or good CD8⁺ T-cell response rate, include the following (see, Cohen et al. (2021) Cell. Rep. Med. 2:100354):

| SARS-CoV-2 | CD8 T-cell | |
|---|---|---|
| protein | response rate | SEQ ID NO |
| S1 | 25% | 438 (full length spike protein); 439 |
| | | (glycoprotein gene) |
| S2 | 12% | 438 (full length spike protein); 439 |
| | | (glycoprotein gene) |
| Envelope (E) | 9% | 450 (gene); 451 (protein) |
| Membrane (M) | | 452 (gene); 453 (protein) |
| Nucleocapsid (N) | 57% | 462 (gene); 463 (protein) |
| ORF3a | 16% | 448 (gene); 449 (protein) |
| ORF6 | | 454 (gene); 455 (protein) |
| ORF7a | 25% | 456 (gene); 457 (protein) |
| ORF7b | | 458 (gene); 459 (protein) |
| ORF8 | | 460 (gene); 461 (protein) |

[1120] The receptor-binding domain (RBD; see, e.g., SEQ ID NO:440) in the S1 subunit of the spike protein interacts directly with ACE2. The metastable pre-fusion conformation of the S protein may be referred to as “laying or down,” while the conformational rearrangement into an ACE2-feasible conformation may be referred to as “up or standing.” The “down” and “up” poses are differentiated based on the conformational rearrangement of the RBD; the down-to-up rearrangement facilitates receptor binding, while the rearrangement of up-to-down helps the virus to evade immune surveillance (see, e.g., Shah et al. (2020) Computational and Structural Biotechnology Journal 18:3401-3414).

[1121] Binding to the ACE2 receptor is followed by cleavage with transmembrane protease serine 2 (TMPRSS2). Both ACE2 and TMPRSS2 are abundantly expressed in the airways, lungs, and nasal/oral mucosa, as well as in the intestines. Naturally occurring mutations in the S protein have been identified in China (H49Y), Europe (V367F and D614G), and the United States (G476S and V483A), and have been studied for their effects on cell entry of SARS-CoV-2; in cells expressing ACE2 and TMPRSS2, the G476S mutation results in reduced cell entry, and the V483A mutation has no effect on cell entry, whereas the D614G, V367F, and H49Y mutations result in enhanced cell entry compared to that of the wild-type S protein. The D614G mutation displays a 3.5-fold higher level of entry activity compared to the wild-type S protein, an effect that is also seen in human small airway epithelial cells. The D614G mutation also results in increased binding affinity for the ACE2 receptor. Furthermore, the D614G mutant retains the neutralization sensitivity of the SARS-CoV-2 virus; anti-SARS-CoV-2 patient sera was able to effectively neutralize both wild-type SARS-CoV-2 and SARS-CoV-2 with the D614G mutation (see, e.g., Ozono et al. (2021) Nature Communications 12:848). The S protein exists as a trimer, and structural analyses indicate that the D614G mutation stabilizes, and thus, prevents premature dissociation of the S trimer (see, e.g., Zhang et al. (2021) Science 372:525-530). The V367F mutant also displays higher binding affinity to ACE2 compared to the reference strain Wuhan-Hu-1, as first isolated in Wuhan in December 2019, which may be due to stabilization of the RBD structure. Virus isolates also have been identified with both the V367F and D614G mutations. Phylogenetic analyses suggest that the V367F mutation evolved along with the D614G mutation, suggesting a synergistic effect of increased infectivity (see, e.g., Ou et al. (2021) bioRvix, doi:10.1101/2020.03.15.991844).

[1122] The N501Y mutation has naturally emerged in SARS-CoV-2 lineages in the UK (B.1.1.7, or 20B/501Y.v1) and South Africa (B.1.351, or 20C/501Y.v2), and occurs at the human ACE2 binding site on the RBD of the SARS-CoV-2 S protein. Molecular dynamic stimulations reveal that N501 in the SARS-CoV-2 S protein RBD is in the proximity of hydrophobic residues of human ACE2; thus, the mutation of hydrophilic N501 into a hydrophobic residue can improve interactions between the S protein and human ACE2. Experimental screens suggest that mutation of N501 into V, F, W, or Y can enhance binding of the RBD with human ACE2. These results have been validated in an in vitro study, showing that the mutations N501Y, N501F, N501W, and N501V result in enhanced binding affinity between the RBD of the spike protein and human ACE2 (see, e.g., Luan et al. (2021) FEBS Letters, doi:10.1002/1873-3468.14076).

[1123] A mutant of the SARS-CoV-2 S-2P variant spike protein (see, e.g., Hsieh et al. (2020) Science 369:1501-1505), with the proline substitutions F817P, A892P, A899P, A942P, K986P, and V987P, designated “HexaPro,” displayed increased expression levels and stability compared to its parental construct. The high yield and increased stability of the HexaPro mutant should allow for the industrial production of subunit vaccines; it can also improve DNA- or mRNA-based vaccines by producing more antigen per nucleic acid molecule, improving the efficacy and/or reducing the dosage required (see, e.g., Hsieh et al. (2020) Science 369:1501-1505).

[1124] Other mutations in the SARS-CoV-2 spike protein, that can enhance or improve its expression and/or its binding to the ACE2 receptor, include, for example, V417K (see, e.g., Shah et al. (2020) Computational and Structural Biotechnology Journal 18:3402-3414); G502D, N501T, and Q498Y, as well as mutations in the residues N439/R426, L452/R426, T470/N457, E484/P470, Q498/Y484 and N501/T487 (see, e.g., Verkhivker et al. (2021) Biochemistry 60(19):1459-1484); and W436R and D364Y (see, e.g., Ou et al. (2021) bioRvix, doi:10.1101/2020.03.15.991844; and U.S. Pat. No. 10,973,908).

[1125] The immunostimulatory bacteria provided herein, when used as vaccines, or to encode viral antigens and/or other proteins to protect against pathogens, such as Severe Acute Respiratory Syndrome coronavirus 2 (SARS-CoV-2, which causes COVID-19), can encode the full length wild-type SARS-CoV-2 spike protein (see, e.g., SEQ ID NO:438), or can encode the full length receptor binding domain (RBD) of the SARS-CoV-2 spike protein (see, SEQ ID NO:440), or can encode a portion of the spike protein RBD that is sufficient to induce or cause an immune response, and/or to immunize or vaccinate or protect a subject against SARS-CoV-2. The immunostimulatory bacteria also can encode mutants of the SARS-CoV-2 spike protein, with mutations in the spike protein or a portion thereof, such as the RBD or a portion thereof, that increase or enhance the expression of the spike protein or RBD or portions thereof, and/or that increase or enhance the binding of the spike protein or RBD, or the portions thereof to the ACE2 receptor. The spike protein or spike protein RBD mutants include any described herein and known in the art, including, but not limited to, those comprising the mutations V367F, D614G, G476S, V483A, H49Y, N501Y, N501F, N501W, N501V, F817P, A892P, A899P, A942P, K986P, V987P, V417K, G502D, N501T, Q498Y, W436R and D364Y, and those comprising mutations at residues corresponding to residues N439/R426, L452/R426, T470/N457, E484/P470, Q498/Y484 and N501/T487 of the spike protein or portion thereof. The immunostimulatory bacteria can be used as vaccines against SARS-CoV-2 by encoding any of the antigenic sequences or modified forms of the spike protein or RBD, including portions thereof, described, for example, in U.S. Pat. Nos. 10,973,908 and 10,702,600. The immunostimulatory bacteria also can be used as vaccines, to deliver the mRNA in the Pfizer-BioNTech COVID-19 vaccine, or in the Moderna COVID-19 vaccine, wherein:
[1126] 1) the sequence of the mRNA in the Pfizer-BioNTech COVID-19 vaccine, as released by the World Health Organization, includes a 5′-capping structure, a 5′ untranslated region (UTR), the extended signal sequence of the S glycoprotein, nucleic acid encoding the full-length spike (S) glycoprotein sequence containing the mutations K986P and V987P, and a poly(A) tail, and comprises the following sequence (SEQ ID NO: 554):

| | |
|---|---|
| GAGAAΨAAAC ΨAGΨAΨΨCΨΨ CΨGGΨCCCCA CAGACΨCAGA GAGAACCCGC | 50 |
| CACCAΨGΨΨC GΨGΨΨCCΨGG ΨGCΨGCΨGCC ΨCΨGGΨGΨCC AGCCAGΨGΨG | 100 |
| ΨGAACCΨGAC CACCAGAACA CAGCΨGCCΨC CAGCCΨACAC CAACAGCΨΨΨ | 150 |
| ACCAGAGGCG ΨGΨACΨACCC CGACAAGGΨG ΨΨCAGAΨCCA GCGΨGCΨGCA | 200 |
| CΨCΨACCCAG GACCΨGΨΨCC ΨGCCΨΨΨCΨΨ CAGCAACGΨG ACCΨGGΨΨCC | 250 |
| ACGCCAΨCCA CGΨGΨCCGGC ACCAAΨGGCA CCAAGAGAΨΨ CGACAACCCC | 300 |
| GΨGCΨGCCCΨ ΨCAACGACGG GGΨGΨACΨΨΨ GCCAGCACCG AGAAGΨCCAA | 350 |
| CAΨCAΨCAGA GGCΨGGAΨCΨ ΨCGGCACCAC ACΨGGACAGC AAGACCCAGA | 400 |
| GCCΨGCΨGAΨ CGΨGAACAAC GCCACCAACG ΨGGΨCAΨCAA AGΨGΨGCGAG | 450 |
| ΨΨCCAGΨΨCΨ GCAACGACCC CΨΨCCΨGGGC GΨCΨACΨACC ACAAGAACAA | 500 |
| CAAGAGCΨGG AΨGGAAAGCG AGΨΨCCGGGΨ GΨACAGCAGC GCCAACAACΨ | 550 |
| GCACCΨΨCGA GΨACGΨGΨCC CAGCCΨΨΨCC ΨGAΨGGACCΨ GGAAGGCAAG | 600 |
| CAGGGCAACΨ ΨCAAGAACCΨ GCGCGAGΨΨC GΨGΨΨΨAAGA ACAΨCGACGG | 650 |
| CΨACΨΨCAAG AΨCΨACAGCA AGCACACCCC ΨAΨCAACCΨC GΨGCGGGAΨC | 700 |
| ΨGCCΨCAGGG CΨΨCΨCΨGCΨ CΨGGAACCCC ΨGGΨGGAΨCΨ GCCCAΨCGGC | 750 |
| AΨCAACAΨCA CCCGGΨΨΨCA GACACΨGCΨG GCCCΨGCACA GAAGCΨACCΨ | 800 |
| GACACCΨGGC GAΨAGCAGCA GCGGAΨGGAC AGCΨGGΨGCC GCCGCΨΨACΨ | 850 |
| AΨGΨGGGCΨA CCΨGCAGCCΨ AGAACCΨΨCC ΨGCΨGAAGΨA CAACGAGAAC | 900 |
| GGCACCAΨCA CCGACGCCGΨ GGAΨΨGΨGCΨ CΨGGAΨCCΨC ΨGAGCGAGAC | 950 |
| AAAGΨGCACC CΨGAAGΨCCΨ ΨCACCGΨGGA AAAGGGCAΨC ΨACCAGACCA | 1000 |
| GCAACΨΨCCG GGΨGCAGCCC ACCGAAΨCCA ΨCGΨGCGGΨΨ CCCCAAΨAΨC | 1050 |
| ACCAAΨCΨGΨ GCCCCΨΨCGG CGAGGΨGΨΨC AAΨGCCACCA GAΨΨCGCCΨC | 1100 |
| ΨGΨGΨACGCC ΨGGAACCGGA AGCGGAΨCAG CAAΨΨGCGΨG GCCGACΨACΨ | 1150 |
| CCGΨGCΨGΨA CAACΨCCGCC AGCΨΨCAGCA CCΨΨCAAGΨG CΨACGGCGΨG | 1200 |
| ΨCCCCΨACCA AGCΨGAACGA CCΨGΨGCΨΨC ACAAACGΨGΨ ACGCCGACAG | 1250 |
| CΨΨCGΨGAΨC CGGGGAGAΨG AAGΨGCGGCA GAΨΨGCCCCΨ GGACAGACAG | 1300 |
| GCAAGAΨCGC CGACΨACAAC ΨACAAGCΨGC CCGACGACΨΨ CACCGGCΨGΨ | 1350 |
| GΨGAΨΨGCCΨ GGAACAGCAA CAACCΨGGAC ΨCCAAAGΨCG GCGGCAACΨA | 1400 |
| CAAΨΨACCΨG ΨACCGGCΨGΨ ΨCCGGAAGΨC CAAΨCΨGAAG CCCΨΨCGAGC | 1450 |
| GGGACAΨCΨC CACCGAGAΨC ΨAΨCAGGCCG GCAGCACCCC ΨΨGΨAACGGC | 1500 |
| GΨGGAAGGCΨ ΨCAACΨGCΨA CΨΨCCCACΨG CAGΨCCΨACG GCΨΨΨCAGCC | 1550 |
| CACAAAΨGGC GΨGGGCΨAΨC AGCCCΨACAG AGΨGGΨGGΨG CΨGAGCΨΨCG | 1600 |
| AACΨGCΨGCA ΨGCCCCΨGCC ACAGΨGΨGCG GCCCΨAAGAA AAGCACCAAΨ | 1650 |
| CΨCGΨGAAGA ACAAAΨGCGΨ GAACΨΨCAAC ΨΨCAACGGCC ΨGACCGGCAC | 1700 |
| CGGCGΨGCΨG ACAGAGAGCA ACAAGAAGΨΨ CCΨGCCAΨΨC CAGCAGΨΨΨG | 1750 |
| GCCGGGAΨAΨ CGCCGAΨACC ACAGACGCCG ΨΨAGAGAΨCC CCAGACACΨG | 1800 |
| GAAAΨCCΨGG ACAΨCACCCC ΨΨGCAGCΨΨC GGCGGAGΨGΨ CΨGΨGAΨCAC | 1850 |
| CCCΨGGCACC AACACCAGCA AΨCAGGΨGGC AGΨGCΨGΨAC CAGGACGΨGA | 1900 |
| ACΨGΨACCGA AGΨGCCCGΨG GCCAΨΨCACG CCGAΨCAGCΨ GACACCΨACA | 1950 |
| ΨGGCGGGΨGΨ ACΨCCACCGG CAGCAAΨGΨG ΨΨΨCAGACCA GAGCCGGCΨG | 2000 |
| ΨCΨGAΨCGGA GCCGAGCACG ΨGAACAAΨAG CΨACGAGΨGC GACAΨCCCCA | 2050 |
| ΨCGGCGCΨGG AAΨCΨGCGCC AGCΨACCAGA CACAGACAAA CAGCCCΨCGG | 2100 |
| AGAGCCAGAA GCGΨGGCCAG CCAGAGCAΨC AΨΨGCCΨACA CAAΨGΨCΨCΨ | 2150 |
| GGGCGCCGAG AACAGCGΨGG CCΨACΨCCAA CAACΨCΨAΨC GCΨAΨCCCCA | 2200 |
| CCAACΨΨCAC CAΨCAGCGΨG ACCACAGAGA ΨCCΨGCCΨGΨ GΨCCAΨGACC | 2250 |
| AAGACCAGCG ΨGGACΨGCAC CAΨGΨACAΨC ΨGCGGCGAΨΨ CCACCGAGΨG | 2300 |
| CΨCCAACCΨG CΨGCΨGCAGΨ ACGGCAGCΨΨ CΨGCACCCAG CΨGAAΨAGAG | 2350 |
| CCCΨGACAGG GAΨCGCCGΨG GAACAGGACA AGAACACCCA AGAGGΨGΨΨC | 2400 |
| GCCCAAGΨGA AGCAGAΨCΨA CAAGACCCCΨ CCΨAΨCAAGG ACΨΨCGGCGG | 2450 |
| CΨΨCAAΨΨΨC AGCCAGAΨΨC ΨGCCCGAΨCC ΨAGCAAGCCC AGCAAGCGGA | 2500 |
| GCΨΨCAΨCGA GGACCΨGCΨG ΨΨCAACAAAG ΨGACACΨGGC CGACGCCGGC | 2550 |
| ΨΨCAΨCAAGC AGΨAΨGGCGA ΨΨGΨCΨGGGC GACAΨΨGCCG CCAGGGAΨCΨ | 2600 |
| GAΨΨΨGCGCC CAGAAGΨΨΨA ACGGACΨGAC AGΨGCΨGCCΨ CCΨCΨGCΨGA | 2650 |
| CCGAΨGAGAΨ GAΨCGCCCAG ΨACACAΨCΨG CCCΨGCΨGGC CGGCACAAΨC | 2700 |
| ACAAGCGGCΨ GGACAΨΨΨGG AGCAGGCGCC GCΨCΨGCAGA ΨCCCCΨΨΨGC | 2750 |
| ΨAΨGCAGAΨG GCCΨACCGGΨ ΨCAACGGCAΨ CGGAGΨGACC CAGAAΨGΨGC | 2800 |
| ΨGΨACGAGAA CCAGAAGCΨG AΨCGCCAACC AGΨΨCAACAG CGCCAΨCGGC | 2850 |
| AAGAΨCCAGG ACAGCCΨGAG CAGCACAGCA AGCGCCCΨGG GAAAGCΨGCA | 2900 |
| GGACGΨGGΨC AACCAGAAΨG CCCAGGCACΨ GAACACCCΨG GΨCAAGCAGC | 2950 |
| ΨGΨCCΨCCAA CΨΨCGGCGCC AΨCAGCΨCΨG ΨGCΨGAACGA ΨAΨCCΨGAGC | 3000 |
| AGACΨGGACC CΨCCΨGAGGC CGAGGΨGCAG AΨCGACAGAC ΨGAΨCACAGG | 3050 |
| CAGACΨGCAG AGCCΨCCAGA CAΨACGΨGAC CCAGCAGCΨG AΨCAGAGCCG | 3100 |
| CCGAGAΨΨAG AGCCΨCΨGCC AAΨCΨGGCCG CCACCAAGAΨ GΨCΨGAGΨGΨ | 3150 |
| GΨGCΨGGGCC AGAGCAAGAG AGΨGGACΨΨΨ ΨGCGGCAAGG GCΨACCACCΨ | 3200 |
| GAΨGAGCΨΨC CCΨCAGΨCΨG CCCCΨCACGG CGΨGGΨGΨΨΨ CΨGCACGΨGA | 3250 |
| CAΨAΨGΨGCC CGCΨCAAGAG AAGAAΨΨΨCA CCACCGCΨCC AGCCAΨCΨGC | 3300 |
| CACGACGGCA AAGCCCACΨΨ ΨCCΨAGAGAA GGCGΨGΨΨCG ΨGΨCCAACGG | 3350 |
| CACCCAΨΨGG ΨΨCGΨGACAC AGCGGAACΨΨ CΨACGAGCCC CAGAΨCAΨCA | 3400 |
| CCACCGACAA CACCΨΨCGΨG ΨCΨGGCAACΨ GCGACGΨCGΨ GAΨCGGCAΨΨ | 3450 |
| GΨGAACAAΨA CCGΨGΨACGA CCCΨCΨGCAG CCCGAGCΨGG ACAGCΨΨCAA | 3500 |
| AGAGGAACΨG GACAAGΨACΨ ΨΨAAGAACCA CACAAGCCCC GACGΨGGACC | 3550 |
| ΨGGGCGAΨAΨ CAGCGGAAΨC AAΨGCCAGCG ΨCGΨGAACAΨ CCAGAAAGAG | 3600 |
| AΨCGACCGGC ΨGAACGAGGΨ GGCCAAGAAΨ CΨGAACGAGA GCCΨGAΨCGA | 3650 |
| CCΨGCAAGAA CΨGGGGAAGΨ ACGAGCAGΨA CAΨCAAGΨGG CCCΨGGΨACA | 3700 |
| ΨCΨGGCΨGGG CΨΨΨAΨCGCC GGACΨGAΨΨG CCAΨCGΨGAΨ GGΨCACAAΨC | 3750 |
| AΨGCΨGΨGΨΨ GCAΨGACCAG CΨGCΨGΨAGC ΨGCCΨGAAGG GCΨGΨΨGΨAG | 3800 |
| CΨGΨGGCAGC ΨGCΨGCAAGΨ ΨCGACGAGGA CGAΨΨCΨGAG CCCGΨGCΨGA | 3850 |
| AGGGCGΨGAA ACΨGCACΨAC ACAΨGAΨGAC ΨCGAGCΨGGΨ ACΨGCAΨGCA | 3900 |
| CGCAAΨGCΨA GCΨGCCCCΨΨ ΨCCCGΨCCΨG GGΨACCCCGA GΨCΨCCCCCG | 3950 |
| ACCΨCGGGΨC CCAGGΨAΨGC ΨCCCACCΨCC ACCΨGCCCCA CΨCACCACCΨ | 4000 |
| CΨGCΨAGΨΨC CAGACACCΨC CCAAGCACGC AGCAAΨGCAG CΨCAAAACGC | 4050 |
| ΨΨAGCCΨAGC CACACCCCCA CGGGAAACAG CAGΨGAΨΨAA CCΨΨΨAGCAA | 4100 |
| ΨAAACGAAAG ΨΨΨAACΨAAG CΨAΨACΨAAC CCCAGGGΨΨG GΨCAAΨΨΨCG | 4150 |
| ΨGCCAGCCAC ACCCΨGGAGC ΨAGCAAAAAA AAAAAAAAAA AAAAAAAAAA | 4200 |
| AAAAGCAΨAΨ GACΨAAAAAA AAAAAAAAAA AAAAAAAAAA AAAAAAAAAA | 4250 |
| AAAAAAAAAA AAAAAAAAAA AAAAAAAAAA AAAA | 4284 |

where Ψ=1-methyl-3′-pseudouridylyl, and the sequence has the following features:

| | | Nucleotide |
|---|---|---|
| Element | Description | Position |
| cap | A modified 5′-cap1 structure (m⁷G⁺m^{3′}-5′- | 1-2 |
| | ppp-5′-Am) | |
| 5′-UTR | 5'-untranslated region derived from human | 3-54 |
| | alpha-globin RNA with an optimized Kozak | |
| | sequence | |
| sig | S glycoprotein signal peptide (extended leader | 55-102 |
| | sequence), which guides translocation of the | |
| | nascent polypeptide chain into the endoplasmic | |
| | reticulum. | |
| S protein_ | Codon-optimized sequence encoding full- | 103-3879 |
| mut | length SARS-CoV-2 spike (S) glycoprotein | |
| | containing mutations K986P and V987P to | |
| | ensure the S glycoprotein remains in an | |
| | antigenically optimal pre-fusion conformation; | |
| | stop codons: 3874-3879 (underlined) | |
| 3′-UTR | The 3′ untranslated region comprises two | 3880-4174 |
| | sequence elements derived from the amino- | |
| | terminal enhancer of split (AES) mRNA and the | |
| | mitochondrial encoded 12S ribosomal RNA to | |
| | confer RNA stability and high total protein | |
| | expression. | |
| poly(A) | A 110-nucleotide poly(A)-tail consisting of a | 4175-4284 |
| | stretch of 30 adenosine residues, followed by a | |
| | 10-nucleotide linker sequence and another 70 | |
| | adenosine residues. | |

and the structure of the 5′ capping structure is:

[chemical structure]

and the structure of m1Ψ=1-methyl-3′-pseudouridylyl is:

[chemical structure]

and
[1127] 2) the sequence of the Moderna COVID-19 vaccine is available (e.g., github.com/NAalytics/Assemblies-of-putative-SARS-CoV2-spike-encoding-mRNA-sequences-for-vaccines-BNT-162b2-and-mRNA-1273/blob/main/Assemblies %20of %20putative %20SARS-CoV2-spike-encoding %20mRNA %20sequences %20for %20vaccines %20BNT-162b2%20and %20mRNA-1273.docx.pdf).

[1128] The sequence of the mRNA in the Pfizer-BioNTech COVID-19 vaccine is publicly available (see, e.g., github.com/NAalytics/Assemblies-of-putative-SARS-CoV2-spike-encoding-mRNA-sequences-for-vaccines-BNT-162b2-and-mRNA-1273/blob/main/Assemblies %20of %20putative %20SARS-CoV2-spike-encoding %20mRNA %20sequences %20for %20vaccines %20BNT-162b2%20and %20mRNA-1273.docx.pdf); it can be used in the bacteria provided herein for delivery as a vaccine, such as delivery to phagocytes, such as phagocytes in situ at sites of infection by such viruses.

[1129] The immunostimulatory bacteria provided herein also can encode antigens to protect against and/or to treat tick-borne and other insect-borne diseases, and other infectious agents, such as prions and malarial pathogens, such as Plasmodium falciparum, as well as bacterial and viral pathogens. The immunostimulatory bacteria also can be used as vaccines against bacterial and protozoan pathogens, including Plasmodium, C. difficile, and Listeria. Salmonella and other bacteria have been used for vaccines; any such known vaccine can be improved by encoding the antigen(s) in the immunostimulatory bacteria provided herein.

[1130] The immunostimulatory bacteria provided herein can induce immunity or an immune response to pathogens, particularly viral pathogens, resulting in effective antibody and T-cell responses. The immunostimulatory bacteria, such as the Salmonella bacteria, include genomic modifications so that they primarily or solely infect myeloid cells, and deliver plasmids that encode therapeutic products, such as antigens and antibodies, as well as additional immune-stimulating products that stimulate or induce an antiviral immune response. The immunostimulatory bacteria infect these antigen-presenting cells, where the encoded therapeutic product(s) are expressed.

[1131] The immunostimulatory bacteria can encode antigens, which result in the immune system of the host producing antibodies, including antibodies that recognize a virus or bacterium or other pathogen before it has infected a cell. The immunostimulatory bacteria for use as antivirals not only can encode antigens, but they can encode antibodies and immunostimulatory proteins to enhance a host's antiviral response. For use as vaccines, the immunostimulatory bacteria, by encoding antigens and other heterologous proteins, result in immunity or result in reduced severity of disease, or prevent the recurrence of persistent viral infections. Encoded antibodies include single-chain forms thereof, such as single-chain variable fragments (scFvs), nanobodies, and other such structures. The immunostimulatory properties of the bacteria, including those derived from encoding immunostimulatory proteins (described herein), such as STING, that enhance or promote an antiviral immune response, and also, the genomic modifications of the bacteria, such as the modifications that eliminate or reduce expression of asparaginase II, which enhance T-cell responses, result in a robust anti-pathogen therapeutic, including activation of type I IFN. As discussed herein, inactivated pathogen vaccines, such as the BCG vaccine for tuberculosis, can be improved by modifying the pathogen to inactivate or eliminate asparaginase activity. Asparaginase can reduce or inhibit the immune response to the vaccine; eliminating or reducing the activity of asparaginase can improve the effectiveness of a vaccine, such as the BCG vaccine.

### F. Constructing Exemplary Plasmids Encoding Therapeutic Products for Bacterial Delivery

[1132] The immunostimulatory bacteria herein can be modified to encode one or more therapeutic products, including immunomodulatory proteins, that promote, or induce, or enhance an anti-tumor response. The therapeutic product can be encoded on a plasmid in the bacterium, under the control of a promotor, such as a bacterial promoter or bacterially recognized promoter, such as a T7 RNA polymerase promoter for expression in the bacteria, or a eukaryotic promoter recognized by RNA polymerase II, for expression in a eukaryotic subject, particularly the subject for whom the immunostimulatory bacterium is to be administered, such as a human. The nucleic acid encoding the therapeutic product(s) can include, in addition to the promoter, other regulatory signals for expression or trafficking in the cells, such as for secretion or expression on the surface of a cell. Immunostimulatory proteins are those that, in the appropriate environment, such as a tumor microenvironment (TME), can promote, or participate in, or enhance an anti-tumor or anti-viral response in the subject to whom the immunostimulatory bacterium is administered.

[1133] Immunostimulatory proteins include, but are not limited to, cytokines, chemokines, and co-stimulatory molecules, including any described herein, and any known to those of skill in the art. For example, immunostimulatory bacteria herein and other delivery vehicles encode combinations of immunostimulatory proteins, such as combinations of cytokines/chemokines and cytosolic DNA/RNA sensors, and other immunostimulatory proteins. Cytosolic DNA/RNA sensors include those that induce or activate type I interferon production, including STING, MDA5, RIG-I, IRF3, and IRF7, and particularly variants that are constitutively active. Also contemplated are such proteins that not only constitutively activate type I interferon (IFN), but also are modified so that they have lower NF-κB signaling activity compared to the corresponding human proteins. Exemplary of such are constitutively active non-human STING protein variants, where the non-human STING has lower NF-κB signaling activity than human, and the chimeric STING polypeptides with replacements to render activity constitutive, as described herein. For example, the constitutively active STING variants include those with the mutations V147L, N154S, V155M, C206Y, R281Q, and/or R284G, and combinations thereof, such as N154S/R284G, and others described herein and known in the art. Constitutively active IRF3 variants include those with the mutations S396D, S398D, S402D, T404D, and/or S405D, and others described herein and known in the art. Other therapeutic products, encoded by the immunostimulatory bacteria herein, include antibodies and antibody fragments, including single-chain fragment variables (scFvs), Fab fragments, Fab′ fragments, F(ab′)₂ fragments, Fv fragments, disulfide-linked Fvs (dsFvs), Fd fragments, Fd′ fragments, single-chain Fabs (scFabs), diabodies, anti-idiotypic (anti-Id) antibodies, synthetic antibodies, recombinantly produced antibodies, multi-specific antibodies (e.g., bi-specific antibodies), human antibodies, non-human antibodies, humanized antibodies, chimeric antibodies, and intrabodies, or antigen-binding fragments of any of the above. The antibodies can be directed against immune checkpoints, such as PD-1, PD-L1, CTLA-4, IDO 1 and 2, CTNNB1 (β-catenin), SIRPα, VISTA, and TREX-1, and others known in the art or described herein, or can be directed against other targets, such as TGF-β, VEGF, HER2, EGFR, STAT3, and IL-6, and other such targets whose inhibition improves the anti-tumor response. The immunostimulatory bacteria also can encode RNAi, such as siRNA (shRNA and miRNA) against immune checkpoints, such as TREX1, and other targets whose inhibition, suppression, or disruption improves the anti-tumor response.

[1134] In some embodiments, the immunostimulatory bacteria herein are engineered to encode one or more cytokines to stimulate the immune system, including, but not limited to, IL-2, IL-7, IL-12 (IL-12p70 (IL-12p40+IL-12p35)), IL-15 (and the IL-15:IL-15R alpha chain complex (IL-15/IL-Ra)), IL-18, IL-21, IL-23, IL-36 gamma, IFN-alpha and IFN-beta. Cytokines stimulate immune effector cells and stromal cells at the tumor site, and enhance tumor cell recognition by cytotoxic cells. In some embodiments, the immunostimulatory bacteria can be engineered to encode chemokines, such as, for example, one or more of CCL3, CCL4, CCL5, CXCL9, CXCL10, and CXCL11. Complementary combinations of any of the therapeutic products can be encoded and delivered to the tumor microenvironment, to enhance the anti-tumor efficacy of the immunostimulatory bacteria. These modifications, and the immunostimulatory bacteria encoding them, are discussed above, and are exemplified below.

### 1. Constitutive Promoters for Heterologous Expression of Proteins

[1135] Plasmids provided herein are designed to encode a therapeutic product, such as an immunostimulatory protein, that, when expressed in a mammalian subject, confers or contributes to anti-tumor immunity in the tumor microenvironment; the immunostimulatory protein or other therapeutic product is encoded on a plasmid in the bacterium under control of a eukaryotic promoter, such as a promoter that is recognized by RNA polymerase II (RNAP II). Generally, the promoter is a constitutive promoter, such as a late eukaryotic virus promoter. Exemplary promoters include, but are not limited to, a cytomegalovirus (CMV) promoter, an elongation factor-1 alpha (EF-1α) promoter, a ubiquitin C (UBC) promoter, a simian virus 40 (SV40) early promoter, a phosphoglycerate kinase 1 (PGK) promoter, a chicken β-actin (CBA) promoter and its derivative promoters CAGG or CAG, a β-glucuronidase (GUSB) promoter, the MND promoter (a synthetic promoter that contains the U3 region of a modified MoMuLV (Moloney murine leukemia virus) LTR with myeloproliferative sarcoma virus enhancer and deleted negative control region), a eukaryotic initiation factor 4A-I (eIF4A1) promoter, a CD68 promoter, and a GAPDH promoter, among others (see, e.g., Powell et al. (2015) Discov. Med. 19(102):49-57). The CAG promoter consists of: (C) the cytomegalovirus (CMV) early enhancer element; (A) the promoter, the first exon, and the first intron of chicken beta-actin gene; and (G) the splice acceptor of the rabbit beta-globin gene. MND is a synthetic promoter that contains the U3 region of a modified MoMuLV (Moloney murine leukemia virus) LTR with myeloproliferative sarcoma virus enhancer and deleted negative control region (murine leukemia virus-derived MND promoter (myeloproliferative sarcoma virus enhancer, negative control region deleted, dl587rev primer-binding site substituted); see, e.g., Li et al. (2010) J. Neurosci. Methods 189:56-64).

[1136] Two or more of these promoters can be encoded in multiple open reading frames (ORFs) on the plasmid. Certain promoters, including, but not limited to, CMV, contain multiple cAMP response element binding protein (CREB) sites. When plasmids containing these elements are released to the cytosol, for example those contained within S. typhimurium that are released into the cytosol following bacterial destruction, they can be efficiently shuttled to the nucleus using the CREB-mediated host microtubule machinery (see, e.g., Bai et al. (2017) Biosci. Rep. 37(6):BSR20160616).

[1137] The plasmids can include multiple promoters, including bacterial promoters, such as for expression of asd, and eukaryotic promoters for expression of therapeutic products. Various configurations of the promoters and other regulatory sequences have been assessed to improve expression of therapeutic products, and to improve bacterial growth and fitness. For example, among the configurations tested, reversing the orientation of the eukaryotic expression cassette on the plasmid, and inclusion of one or more bacterial terminators, can increase the efficiency of encoded payload expression, and can improve bacterial fitness.

### 2. Multiple Therapeutic Product Expression Cassettes

a. Single Promoter Constructs

[1138] Expression of multiple genes in the same cell from a single construct can be achieved, and is advantageous when the co-expression of several proteins is required to elicit a desired biological effect, such as an anti-tumor response. Internal ribosome entry site (IRES) sequences have been used to separate two coding sequences under control of a single promoter, however, the expression level of the second protein can be reduced compared to the first protein, and the length of the IRES sequence can be prohibitive in certain cases, such as when using viruses with small packaging capacities. The discovery of short (˜18-22 amino acid long), virus-derived peptide sequences, known as 2A peptides, that mediate a ribosome-skipping event, enables the generation of multiple separate peptide products, at similar levels, from a single mRNA. The 2A peptide coding sequence is included between the polypeptide-encoding transgenes (see, e.g., Daniels et al. (2014) PLoS One 9(6):e100637).

[1139] IRES elements and 2A peptides use different mechanisms for co-expression of multiple genes in one transcript. For example, when using an IRES element to express multiple genes in one mRNA, the gene directly downstream of the promoter is translated by the canonical cap-dependent mechanism, and those downstream of the IRES element are translated by a cap-independent mechanism, which has a lower translation efficiency than the cap-dependent mechanism, resulting in unbalanced expression, with lower expression of the IRES-driven gene (see, e.g., Chng et al. (2015) mAbs 7(2):403-412). 2A linked genes, on the other hand, are translated in one open reading frame (ORF). The cleavage of proteins separated by a 2A sequence occurs co-translationally, in an unconventional process, where a peptide bond often fails to form (i.e., the peptide bond is “skipped”) between the C-terminal glycine and proline in the 2A peptide. Despite this, translation proceeds, and two distinct proteins are produced in equal amounts. A short stretch, coding for approximately 20 amino acids, of the 2A peptide sequence, is sufficient to cause the bond-skipping. If the bond skipping does not occur, however, a fusion protein is generated that will not subsequently cleave (see, e.g., Daniels et al. (2014) PLoS One 9(6):e100637).

[1140] Many of these 2A peptides have been described, including, but not limited to, T2A (see, e.g., SEQ ID NO:327) from Thosea asigna virus, P2A (see, e.g., SEQ ID NO:328) from porcine teschovirus-1, E2A (see, e.g., SEQ ID NO:329) from equine rhinitis A virus, and F2A (see, e.g., SEQ ID NO:330) from foot-and-mouth disease virus, among others. Different studies have reported conflicting cleavage efficiencies of the various 2A peptides, and the cleavage efficiency of a 2A peptide can be affected by the nature of the protein expressed, the order of genes flanking the 2A sequence, the length of the 2A peptide used, and the linker between the upstream protein and 2A peptide. Cleavage efficiency and enhanced protein expression can often be improved through the use of upstream viral cleavage sequences, such as, but not limited to, the peptide furin cleavage sequence, RRKR, as well as by inserting GSG and SGS peptide linkers, a V5 epitope tag (GKPUPNPLLGLDST), or a 3×Flag epitope tag immediately preceding the 2A (see, e.g., Chng et al. (2015) mAbs 7(2):403-412).

[1141] The immunostimulatory bacteria herein, containing plasmids encoding therapeutic products, such as immunomodulatory proteins, with a single promoter and ORF, can express two or more proteins through the use of viral internal ribosomal entry sites (IRES), which are cap-independent, or through translational read-through of 2A peptides, and subsequent self-cleavage into equally expressed co-proteins. The plasmids can contain other regulatory elements, as discussed below and elsewhere herein. For example, an exemplary construct (see, Example 14) is CMV-muIL-2 CO_T2A_muIFN-α2-WPRE, where codon optimized murine IL-2 is co-expressed with murine IFN-α2, using a CMV promoter, and a T2A peptide. Additionally, a Woodchuck Hepatitis Virus (WHP) Posttranscriptional Regulatory Element (WPRE) is included, to enhance expression. If, for example, a third therapeutic product is to be expressed by the plasmid, a 2A sequence is flanked by the first two proteins, which are expressed under the control of a first promoter, e.g., CMV, and a third protein is encoded under the control of a second promoter, e.g., EF-1a. Exemplary of such a construct is CMV-muIL-15Rα/IL-15sc_T2A_muSTING-R283G+EF-1α-muIL-18-WPRE, where murine 15Rα/IL-15sc, and murine STING with the replacement R283G or N153S/R283G (corresponding to R284G or N154S/R284G, respectively, in human STING) are co-expressed under control of a CMV promoter, using T2A, and murine IL-18 is expressed separately under control of an EF-1α promoter. This exemplary construct also includes a WPRE for enhanced expression.

[1142] As described herein, the immunostimulatory bacteria can be used as vaccines in which the encoded antigen(s) is/are expressed under control of a bacterial promoter for transcription in the bacterium, but include regulatory sequences, such as an IRES, that prevents translation in the bacterium, but facilitates or permits translation in the eukaryotic host, such as a human. Nucleic acid constructs encoding such antigens can optionally encode additional immune system/response enhancing proteins, such as a STING protein, and/or a cytokine, and/or other combinations, which in effect, act as adjuvants.

b. Dual/Multiple Promoter Constructs

[1143] Alternatively, the genetic payloads/therapeutic products can be expressed using dual or multiple promoter constructs, where each protein is expressed under the control of a separate promoter. Thus, plasmids encoding therapeutic products, such as immunomodulatory proteins, expressed in combinations, can contain multiple promoters, each controlling an individual intact ORF with proper stop codon processing (i.e., dual/multiple promoter constructs); or multiple proteins can be expressed in a single ORF through the use of 2A peptides (i.e., single promoter constructs); or the plasmid can contain a mixture of single and dual/multiple promoter constructs, to express three or more proteins, as described above.

### 3. Regulatory Elements

a. Post-Transcriptional Regulatory Elements

[1144] In order to enhance expression of single and multiple therapeutic products/immunomodulatory proteins from a single plasmid, regulatory elements may be employed that enhance the transcription and translation of the protein(s) of interest. For example, the post-transcriptional regulatory element (PRE) of woodchuck hepatitis virus (WPRE), when inserted in the 3′ untranslated region of the ORF, can enhance expression levels several fold (see, e.g., Zufferey et al. (1999) J. Virol. 73(4):2886-2892). Similarly, other such elements, including, but not limited to, the Hepatitis B Virus PRE (HPRE), also can enhance expression. The combination of these can be used at the 3′ ends of multiple ORFs to improve expression of multiple proteins on a single plasmid.

[1145] The PREs WPRE and HPRE are hepadnaviral cis-acting RNA elements that can increase the accumulation of cytoplasmic mRNA by promoting mRNA exportation from the nucleus, and can enhance post-transcriptional processing and stability.

b. Polyadenylation Signal Sequences and Terminators

[1146] Other elements on the plasmid that can enhance protein expression include polyadenylation signal sequences and terminators. Polyadenylation is the post-transcriptional addition of a poly(A) tail to the 3′ end of an mRNA transcript, which is part of the process that produces mature mRNA for translation. Polyadenylation signal sequences are important for nuclear export, mRNA stability, and efficient translation. A terminator is a sequence that defines the end of a transcript, creating a free 3′ end, and initiates the release of the newly synthesized mRNA from the transcriptional machinery. The free 3′ end is then available for the addition of the poly(A) tail. Terminators are found downstream of the gene to be transcribed, and typically occur directly after any 3′ regulatory elements, such as the polyadenylation or poly(A) signal. Commonly used mammalian terminators in expression plasmids include the simian virus 40 (SV40), human growth hormone (hGH), bovine growth hormone (BGH or bGH), and rabbit beta-globin (rbGlob) poly(A) sequences, that include the sequence motif AAUAAA (SEQ ID NO:398), and promote both polyadenylation and termination.

[1147] When placed at the 3′ end of the ORF, sequences such as the simian virus 40 poly A (SV40 pA) or the bovine growth hormone poly A (bGHpA) signals, result in several-fold increased expression both in vitro and in vivo (see, e.g., Powell et al. (2015) Discov. Med. 19(102):49-57). These and other such elements can further enhance the expression and translation of multiple therapeutic products, including immunomodulatory proteins, expressed from a single plasmid.

c. Enhancers

[1148] Promoters and enhancers are found upstream of the multiple cloning site (MCS) in a plasmid, and cooperate to determine the rate of transcription. Enhancers are sequences that bind activator proteins, in order to loop the DNA, and bring a specific promoter to the initiation complex, thus increasing the rate of transcription. They can be adjacent to, or far from the promoter they influence, and include CMV, EF-1α, SV40, and synthetic enhancers, or the MND promoter, which is a synthetic promoter that contains the U3 region of a modified MoMuLV (Moloney murine leukemia virus) LTR with myeloproliferative sarcoma virus enhancer. The immunostimulatory bacteria herein contain plasmids that can comprise enhancer(s) to enhance the expression of the therapeutic products/proteins encoded on the plasmids.

d. Secretion Signals

[1149] A secretion signal, also known as a signal sequence or peptide, a leader sequence or peptide, or a localization signal or sequence, is a short peptide at the N-terminus of a newly synthesized protein that is to be secreted. Signal peptides promote a cell to translocate a protein, usually to the cellular membrane. The efficiency of protein secretion is strongly determined by the signal peptide. Thus, the immunostimulatory bacteria herein contain plasmids that can comprise a signal peptide/secretion signal peptide, to facilitate and/or increase the expression or secretion of the encoded therapeutic product(s).

e. Improving Bacterial Fitness

[1150] The plasmids in the immunostimulatory bacteria that encode the therapeutic products, include genes and regulatory elements that are provided for expression of bacterial genes, and also, for expression of complex polycistronic eukaryotic payloads. The switch between such evolutionarily divergent organisms introduces challenges for proper functioning in prokaryotes and eukaryotes. The bacteria are cultured in vitro, then administered to a eukaryotic subject, where the plasmids are delivered to cells, particularly to tumor-resident myeloid cells, in cancer subjects, where the payloads are expressed, processed and trafficked. Transcriptional leakiness from the eukaryotic promoter, such as the CMV promoter, in bacteria, combined with large eukaryotic genes and regulatory sequences, can result in reduced bacterial fitness that manifests as low injection stock viability, and reduced growth rate in broth culture.

### 4. Origin of Replication and Plasmid Copy Number

[1151] Plasmids are autonomously-replicating, extra-chromosomal circular double-stranded DNA molecules that are maintained within bacteria by means of a replication origin. Copy number influences the plasmid stability. High copy number generally results in greater stability of the plasmid when the random partitioning occurs at cell division. A high copy number of plasmids generally decreases the growth rate, thus possibly allowing for bacterial cells with few plasmids to dominate the culture, since they grow faster. This can be ameliorated by using gene attenuation and gene dosing strategies, that limit the expression of certain genes on the plasmid that can be toxic to the bacteria when present in high copy numbers. The origin of replication also determines the plasmid's compatibility, i.e., its ability to replicate in conjunction with another plasmid within the same bacterial cell. Plasmids that utilize the same replication system cannot co-exist in the same bacterial cell; they are said to belong to the same compatibility group. The introduction of a new origin, in the form of a second plasmid from the same compatibility group, mimics the result of replication of the resident plasmid. Thus, any further replication is prevented until after the two plasmids have been segregated to different cells to create the correct pre-replication copy number.

[1152] Numerous bacterial origins of replication are known to those of skill in the art. The origin can be selected to achieve a desired copy number. Origins of replication contain sequences that are recognized as initiation sites of plasmid replication via DNA dependent DNA polymerases (see, e.g., del Solar et al. (1998) Microbiol. Mol. Biol. Rev. 62(2):434-464). Different origins of replication provide for varying plasmid copy levels within each cell, and can range from one to hundreds of copies per cell. Commonly used bacterial plasmid origins of replication include, but are not limited to, pMB1 derived origins, which have very high copy derivatives, such as pUC, and lower copy derivatives, such as pBR322, as well as ColE1, p15A, and pSC101, and other origins, which have low copy numbers. Such origins are well-known to those of skill in the art. For example, the pUC19 origin results in a copy number of 500-700 copies per cell. The pBR322 origin has a known copy number of 15-20 copies per cell. These origins only vary by a single base pair. The ColE1 origin copy number is 15-20, and derivatives, such as pBluescript, have copy numbers ranging from 300-500. The p15A origin that is in plasmid pACYC184, for example, results in a copy number of approximately 10. The pSC101 origins confer a copy number of approximately 5. Other low copy number vectors from which origins of replication can be obtained, include, for example, pWSK29, pWKS30, pWSK129, and pWKS130 (see, e.g., Wang et al. (1991) Gene 100:195-199). Medium to low copy number is less than 150, or less than 100. Low copy number is less than 20, 25, or 30. Generally, less than medium copy number is less than 150 copies, and less than low copy number is less than about 25 or less than 25 copies, and generally, copy number refers to the average copies of plasmid per bacterium in a preparation. Those of skill in the art can identify plasmids with low, medium, or high copy numbers. For example, one method to determine experimentally if the copy number is high or low is to perform a miniprep. A high-copy plasmid should yield between 3-5 μg DNA per 1 ml LB culture; a low-copy plasmid will yield between 0.2-1 μg DNA per ml of LB culture. Sequences of bacterial plasmids, including identification of and sequence of the origin of replication, are well known (see, e.g., snapgene.com/resources/plasmid_files/basic_cloning_vectors/pBR322/). Exemplary origins of replication, and their plasmid copy numbers, are summarized in the table below.

| | Copy | SEQ ID |
|---|---|---|
| Origin of Replication | Number | NO. |
| pMB1 | Varies | 254 |
| p15A | 10-12 | 255 |
| pSC101 | ~5 | 256 |
| pBR322 | 15-20 | 243 |
| ColE1 | 15-20 | 257 |
| pPS10 | 15-20 | 258 |
| RK2 | ~5 | 259 |
| R6K (alpha origin) | 15-20 | 260 |
| R6K (beta origin) | 15-20 | 261 |
| R6K (gamma origin) | 15-20 | 262 |
| P1 (oriR) | Low | 263 |
| R1 | Low | 264 |
| pWSK | Low | 265 |
| ColE2 | 10-15 | 266 |
| pUC (pMB1) | 500-700 | 267 |
| F1 | 300-500 | 268 |

[1153] High copy plasmids are selected for heterologous expression of proteins in vitro, because the gene dosage is increased relative to chromosomal genes, there are higher specific yields of protein, and for therapeutic bacteria, higher therapeutic dosages of encoded therapeutics. It is shown, herein, however, that for delivery of plasmids encoding therapeutic products (e.g., immunomodulatory proteins), such as by S. typhimurium, in some embodiments, a high copy plasmid might be advantageous.

[1154] The requirement for bacteria to maintain the high copy plasmids can be a problem if the expressed molecule is toxic to the organism. The metabolic requirements for maintaining these plasmids can come at a cost of replicative fitness in vivo. Optimal plasmid copy number for delivery of therapeutic products can depend on the mechanism of attenuation of the strain engineered to deliver the plasmid. If needed, the skilled person, in view of the disclosure herein, can select an appropriate copy number for a particular immunostimulatory species and strain of bacteria.

[1155] For use as vaccines and/or to deliver RNA (such as mRNA) where the encoded products are expressed in the bacterium, the plasmid can be in higher or high copy number (greater than 150), to increase the amount of RNA or mRNA produced.

### 5. CpG Motifs and CpG Islands

[1156] Unmethylated cytidine-phosphate-guanosine (CpG) motifs are prevalent in bacterial, but not in vertebrate, genomic DNA. Pathogenic DNA and synthetic oligodeoxynucleotides (ODNs) containing CpG motifs activate host defense mechanisms, leading to innate and acquired immune responses. The unmethylated CpG motifs contain a central unmethylated CG dinucleotide plus flanking regions. In humans, four distinct classes of CpG ODNs have been identified, based on differences in structure, and in the nature of the immune response they induce. K-type ODNs (also referred to as B-type) contain from 1 to 5 CpG motifs, typically on a phosphorothioate backbone. D-type ODNs (also referred to as A-type) have a mixed phosphodiester/phosphorothioate backbone and have a single CpG motif, flanked by palindromic sequences that permit the formation of a stem-loop structure, as well as poly G motifs at the 3′ and 5′ ends. C-type ODNs have a phosphorothioate backbone and contain multiple palindromic CpG motifs that can form stem loop structures or dimers. P-Class CpG ODNs have a phosphorothioate backbone, and contain multiple CpG motifs with double palindromes that can form hairpins at their GC-rich 3′ ends (see, e.g., Scheiermann et al. (2014) Vaccine 32(48):6377-6389). For purposes herein, the CpGs are encoded in the plasmid DNA; they can be introduced as a motif, or in a gene.

[1157] Toll-like receptors (TLRs) are key receptors for sensing pathogen-associated molecular patterns (PAMPs) and activating innate immunity against pathogens (see, e.g., Akira et al. (2001) Nat. Immunol. 2(8):675-680). TLR9 recognizes hypomethylated CpG motifs in the DNA of prokaryotes that do not occur naturally in mammalian DNA (see, e.g., McKelvey et al. (2011) J. Autoimmun. 36:76-86). Recognition of CpG motifs, upon phagocytosis of pathogens into endosomes in immune cell subsets, and activates innate and adaptive immunity.

[1158] Immunostimulatory bacteria, such as Salmonella species, such as S. typhimurium strains, carrying plasmids containing CpG islands or motifs, are provided herein. These bacteria can activate TLR9. As exemplified herein, bacterial plasmids that contain hypomethylated CpG islands can elicit innate and adaptive anti-tumor immune responses that, in combination with the therapeutic products encoded on the plasmid, such as immunostimulatory proteins and constitutively active variants of STING, IRF3, and other cytosolic DNA/RNA sensors, can have synergistic or enhanced anti-tumor activity. For example, the asd gene (see, e.g., SEQ ID NO:48) encodes a high frequency of hypomethylated CpG islands. CpG motifs can be included in combination with any of the therapeutic products, described or apparent from the description herein, in the immunostimulatory bacteria, to thereby enhance or improve anti-tumor immune responses in a treated subject.

[1159] Immunostimulatory CpGs can be included in the plasmids, by including a nucleic acid, typically from a bacterial gene, that encodes a gene product, and also by adding a nucleic acid that encodes CpG motifs. The plasmids herein can include CpG motifs. Exemplary CpG motifs are known (see, e.g., U.S. Pat. Nos. 8,232,259, 8,426,375, and 8,241,844). These include, for example, synthetic immunostimulatory oligonucleotides, that are between 10 and 100, 10 and 20, 10 and 30, 10 and 40, 10 and 50, or 10 and 75, base pairs long, with the general formula: (CpG)., where n is the number of repeats. Generally, at least one or two repeats are used; non-CG bases can be interspersed. Those of skill in the art are very familiar with the general use of CpG motifs for inducing an immune response by modulating TLRs, particularly TLR9.

### 6. Plasmid Maintenance/Selection Components

[1160] The maintenance of plasmids in laboratory settings is usually ensured by the inclusion of an antibiotic resistance gene on the plasmid, and the use of antibiotics in the growth media. As described above, the use of an asd deletion mutant, complemented with a functional asd gene on the plasmid, allows for plasmid selection in vitro without the use of antibiotics, and allows for plasmid maintenance in vivo. The asd gene complementation system provides for such selection/maintenance (see, e.g., Galán et al. (1990) Gene 94(1):29-35). The use of the asd gene complementation system to maintain plasmids in the tumor microenvironment increases the potency of S. typhimurium and other immunostimulatory bacterial strains, engineered to deliver plasmids encoding therapeutic products, such as immunostimulatory proteins, constitutively active cytosolic DNA/RNA sensors, antibodies, antibody fragments, or other such products as discussed herein.

### 7. DNA Nuclear Targeting Sequences

[1161] DNA nuclear targeting sequences (DTS), such as the SV40 DTS, mediate the translocation of DNA sequences through the nuclear pore complex. The mechanism of this transport is reported to be dependent on the binding of DNA binding proteins that contain nuclear localization sequences. The inclusion of a DTS on a plasmid to increase nuclear transport and expression has been demonstrated (see, e.g., Dean, D. A. et al. (1999) Exp. Cell Res. 253(2):713-722), and has been used to increase gene expression from plasmids delivered by S. typhimurium (see, e.g., Kong et al. (2012) Proc. Natl. Acad. Sci. U.S.A. 109(47):19414-19419).

[1162] Rho-independent or class I transcriptional terminators, such as the T1 terminator of the rrnB gene of E. coli, contain sequences of DNA that form secondary structures that cause dissociation of the transcription elongation complex. Transcriptional terminators are included in the plasmid in order to prevent expression of heterologous proteins by the S. typhimurium transcriptional machinery. This ensures that expression of the therapeutic products is confined to the host cell transcriptional machinery.

[1163] Plasmids used for transformation of Salmonella, such as S. typhimurium, as a cancer therapy described herein, contain all or some of the following attributes: 1) one or more constitutive promoters for heterologous expression of proteins; 2) one or more human immunomodulatory expression cassettes; 3) a bacterial origin of replication and optimized plasmid copy number; 4) immunostimulatory CpG islands; 5) an asd gene selectable marker for plasmid maintenance and selection; 6) DNA nuclear targeting sequences; and 7) transcriptional terminators.

### G. Exemplary Bacterial Strains and Mechanism of Action for Use as Vaccines and Therapeutics

[1164] As described throughout, provided are immunostimulatory bacteria that contain genome modifications that improve their properties for use as anti-cancer therapeutics, as vaccines against pathogens, and as delivery vehicles for RNA, which can be used for as therapeutic products, or, that, can be translated to provide immunostimulatory products, antigens, and combinations thereof for the various uses. The immunostimulatory bacteria include genomic modifications discussed throughout that improve their properties for use as anti-cancer therapeutics, for vaccines, and RNA delivery platforms, and also that reduce the inflammatory properties of bacteria, also include payloads, including combinations of payload products, that enhance or act with the properties of the bacteria for these applications. Payloads and genomic modifications are discussed and described throughout the disclosure herein, and are exemplified in the working examples below. The following is a discussion of exemplary bacteria, combinations of genomic modifications and payloads, and particularly advantageous for their use as vaccines. Disclosure throughout describes properties, payloads, and modifications for use as cancer therapeutics, and as therapeutics that are generally useful for appropriate immune stimulation or modulation for use for treating cancer and other diseases and conditions.

[1165] It is understood that the skilled artisan can effect similar genomic modifications in other bacterial species and strains, such as E. coli, and Listeria, to achieve similar effects and results. Additionally, as discussed above non-Salmonella species can be modified to encode a rck gene, such the rck gene from Salmonella, to increase resistance to complement.

[1166] For vaccination, the use and general mechanism of action for the bacteria provided herein includes administration, particularly direct tissue administration, such as by intramuscular injection, inhalation, intradermal administration, vaginal administration, and other such routes, to generate an in situ immune response to the antigen or product, which can be for prevention (immunization to develop an immmunoprotective response) or treatment, for a pathogen or for cancer. The bacteria induce durable adaptive antiviral immunity. The bacteria are suitably formulated for the selected route. This can include formulation, for example, as an aerosol, tablet, emulsion, powder, as appropriate. The so-formulated administered bacteria are taken up into tissue-resident phagocytes, by phagocytosis. For these purposes, the bacteria are modified so that they do no replicate in vivo, but deliver their payloads into the cells, such as tissue-resident phagocytic antigen-presenting cells (APCs). The encoded products include, for example antigens for presentation, STING to induce type I IFN. The encoded products can go into the lymph nodes resulting in antibodies via CD4+ and CD8+ priming, and the APCs present for priming and activation of antigen-specific CD8+ cells, which stimulate IFN-gamma, and also participate in direct killing of virally infected cells; macrophages phagocytose apoptotic infected cells, thereby spreading epitopes, which results in further T-cell activation

### 1. Exemplary Immunostimulatory Bacteria—In Situ Cancer Vaccination Mechanism of Action (MOA)

[1167] Among the immunostimulatory bacteria provided herein are immunostimulatory bacteria that are designed to accumulate in tumor-resident myeloid cells, such as macrophage, and other phagocytic cells, such as when subjects are vaccinated with bacteria designed as vaccines. Bacteria provided herein contain a plasmid that encodes immunostimulatory proteins and combinations thereof that induce an anti-viral/anti-tumor immune response. The genomic modifications include the elimination of flagella, alterations of the LPS, and elimination of curli fimbriae. These or modifications in bacterial strains with similar effects, reduce TLR2/4/5 responses/signaling, and result in accumulation in the tumor microenvironment and myeloid cells. Other modifications include auxotrophies, such as asd⁻ or thyA⁻ that render the bacteria unable to grow in vivo, and other auxotrophies, such as including purI⁻, that render the bacteria auxotrophic for adenosine, and other modifications that increase their accumulation in the tumor microenvironment, which can have elevated adenosine, which is immunosuppressive, and genomic modifications to eliminate or inactivate asparaginase, which can inhibit T-cells. The combination of some or all of these bacterial modifications results in bacteria that accumulate in the macrophage in the tumor microenvironment and tumors. Exemplary of such immunostimulatory bacteria is the strain designated YS1646Δasd/ΔFLG/ΔpagP/ΔansB/ΔcsgD/F-ΔpurI strain. The strain can be used, for example, for in situ cancer antigen vaccination, where the strain contains a plasmid expressing either STING, eSTING (referring to engineered STING, such as those provided herein, particularly those that constitutively induce type I interferon), IL-15 (or IL-15 receptor complex)+eSTING, and other type I IFN producing combinations of payloads, expressed under control of a eukaryotic promoter, such as the CMV promoter. The plasmid additionally contains sequences encoding the open reading frames of full-length tumor antigens or peptide antigen fragments. The route of administration is IV, whereby the strain traffics to the tumor and is taken up by tumor-resident macrophages, resulting in plasmid transfer to the nucleus and expression of payloads. In the presence of type I IFN, the macrophages process and present the cancer antigens for CD8⁺ T-cell priming within the tumor, as well as trafficking to the lymph nodes to prime CD4⁺ and CD8⁺ T-cells. Primed and activated CD8⁺ T-cells eliminate tumor cells bearing the primed antigen, induce long-lived tissue-resident memory CD8+ T-cells, as well as circulating as memory T-cells after the tumor is cleared to prevent tumor recurrence.

2. Exemplary immunostimulatory bacteria for Peripheral Cancer Vaccination and Mechanism of Action

[1168] The YS1646Δasd/ΔFLG/ΔpagP/ΔansB/ΔcsgD/F-ΔpurI/ΔthyA strain containing an additional thymidine auxotrophy is used for peripheral cancer antigen vaccination and tumor treatment. The strain cannot proliferate in the absence of thymidine supplementation, and, upon administration, as by intramuscular injection into an extremity, it is phagocytosed by tissue-resident macrophages, such as following IM injection in the arm. The strain contains a plasmid that encodes STING, eSTING, IL-15+eSTING, or other type I IFN producing combination, as well as sequences of full-length tumor antigens or peptides, from either a bacterial promoter and IRES sequence or a eukaryotic promoter. For the bacterial promoter containing strains, the bacteria will then transcribe the RNA of these encoded payloads, and deliver them upon phagocytosis and destruction by tissue-resident macrophages. For the eukaryotic promoter containing strains, the phagocyte transcribes the RNA. The resulting mRNA the is translated into proteins, and the encoded antigens are presented by the macrophages in the presence of type I IFN for CD8⁺ T-cell priming. The cancer antigen-primed CD8⁺ T-cells circulate and eliminate cancerous cells, such as those that remain after surgical tumor resection. Strains such as this also are used as a prophylactic vaccine to reduce the risk of developing a particular cancer, such as for vaccination against familial genetic mutations that could lead to tumor formation.

### 3. Exemplary Immunostimulatory Bacteria for Pathogen Vaccination and Mechanism of Action (MOA)

[1169] Also provided are bacterial strains that include additional auxotrophy, such as thyA⁻ strains. Exemplary of such include YS1646Δasd/ΔFLG/ΔpagP/ΔansB/ΔcsgD/F-ΔpurI/ΔthyA strain, which has an additional thymidine auxotrophy. Such strains cannot proliferate in the absence of thymidine supplementation. These strains can be used for vaccination against pathogens. They are administered by route that infection by the particular pathogen occurs naturally. Following administration, such as by intramuscular, intranasal, inhalation, or oral delivery, or combinations thereof, depending on the site or sites where the infection naturally occurs, they are cleared from tissue-resident macrophages, leaving plasmids. These strains contain a plasmid encoding an immunostimulatory protein or combination thereof, such as STING, engineered STING (eSTING), IL-15+eSTING, or other type I IFN producing proteins or combinations of proteins, and also pathogen sequences of antigens and/or peptides, under transcriptional control of a bacterial promoter, but including eukaryotic sequences, such as an IRES, for translation by eukaryotic ribosomes. The bacteria produce RNA encoding these payloads, and, after administration, upon phagocytosis and destruction by tissue-resident macrophages, deliver the encoded mRNA. The mRNA is translated into proteins by the eukaryotic host cells, and the antigens are presented by the macrophages in the presence of type I IFN for CD8⁺ T-cell priming. The type I IFN can be stimulated by the encoded immunostimulatory protein, such as a STING or modified STING. Additionally, the bacteria can provide the type I IFN and pathogen antigens as proteins using a plasmid with a bacterial promoter and sequences for bacterial transcription and translation. The macrophages then prime CD8⁺ T-cells in the tissue, as well as traffic to the lymph nodes to prime CD4⁺ and CD8⁺ T-cells. Primed and activated CD8⁺ T-cells then circulate as patrolling memory T-cells, as well as traffic back to the tissue of origin to remain as tissue-resident memory CD8⁺ T-cells. The primed CD4⁺ T-cells induce B-cell activation to produce high titers of durable neutralizing antibodies. This vaccination strategy mimics the highly successful smallpox, polio, measles, chicken pox, and other live-attenuated vaccines that are administered in the tissues where disease would naturally occur.

### 4. Exemplary Immunostimulatory Bacteria for Treatment of Cancer

[1170] As discussed throughout the disclosure herein, bacteria provide herein can be administered, such as systemically, for treatment of cancer. The bacteria, such as strains that have phenotypes that are like YS1646Δasd/ΔFLG/ΔpagP//ΔcsgD/ or YS1646Δasd/ΔFLG/ΔpagP/ΔansB/ΔcsgD/F-ΔpurI, or other such strains that have penta-acylated LPS, lack curli fimbriae, lack flagella, and are adenosine auxotrophs, and other optional genome modifications, target tumor-resident myeloid cells, and are taken up phagocytic cells. These bacteria are well-tolerated and non-toxic, even at high doses.

[1171] These bacteria, which are phagocytosed by phagocytic cells, encode therapeutic proteins, particularly proteins used for anti-cancer treatment. Exemplary of the encoded payloads are the combination of a cytokinie, such as IL-15/IL-15R alpha chain complex, and a modified cytosolic DNA/RNA sensor protein that induce type I interferon (IFN), such as the modified STING proteins (eSTING) that constitutively induce type I interferon (IFN) in phagocytic cells, such as proliferating macrophage. Other payloads of interest include a type I interferon (IFN), such as and IFNa and/or IFNb, and also combinations with other proteins, such as a tumor-associated antigens. The Examples below exemplify the anti-tumor activities that result upon administration of these bacteria.

[1172] It is shown herein, for example, that the bacteria delivering combination of IL-15/IL-15R alpha chain complex and eSTING (and similar combinations) synergistically activate human dendritic cells to potently stimulate antigen-specific CD8+ T-cell responses. These bacteria are shown to result in a higher cure rate in rodent models, such as the difficult-to-treat EMT6 metastatic orthotopic TNBC model. Intravenous administration of these bacteria demonstrates significant T-cell infiltration in T-cell excluded tumors, such as the metastatic EMT6 TNBC breast cancer, including demonstrating cures of metastatic disease and protection from orthotopic tumor re-challenge in a CD8+ T-cell dependent manner. As shown in the Examples, these bacteria demonstrate tumor colonization and T-cell infiltration in a breast cancer immune desert model. As described above and demonstrated in the examples, these bacteria result in a heretofore not observed advantageous hybrid M1//M2 phenotype.

[1173] As shown in the examples, immunostimulatory bacteria provided herein render checkpoint refractory tumors susceptible to anti-checkpoint inhibitors, such as anti-PD-L1 and anti-PD-1 therapies.

### H. Pharmaceutical Production, Compositions, and Formulations

[1174] Provided herein are methods for manufacturing, and pharmaceutical compositions and formulations, containing any of the immunostimulatory bacteria provided herein and pharmaceutically acceptable excipients or additives. The pharmaceutical compositions can be used in the treatment of diseases, such as hyperproliferative diseases or conditions, such as a tumor or cancer. The immunostimulatory bacteria can be administered as a single agent therapy, or can be administered in a combination therapy with a further agent(s) or treatment(s). Combination therapy includes combining therapy with the immunostimulatory bacteria and/or other delivery vehicles provided herein, with any other anti-cancer therapy or treatment, including, but not limited to, immunotherapies, such as CAR-T therapy and checkpoint inhibitors, radiation, surgery, chemotherapeutic agents, such as nucleoside analogs and platinum compounds, and cellular therapies. The compositions can be formulated for single dosage administration, or for multiple dosage administration. The agents can be formulated for direct administration. The compositions can be provided as a liquid or dried formulation.

### 1. Manufacturing

a. Cell Bank Manufacturing

[1175] As the active ingredient of the immunotherapeutic described herein is composed of engineered self-replicating bacteria, the selected composition will be expanded into a series of cell banks that will be maintained for long-term storage and as the starting material for manufacturing of the drug substance. Cell banks are produced under current good manufacturing practices (cGMP) in an appropriate manufacturing facility per the Code of Federal Regulations (CFR) 21 part 211, or other relevant regulatory authority. As the active agent of the immunotherapeutic is a live bacterium, the products described herein are, by definition, non-sterile and cannot be terminally sterilized. Care must be taken to ensure that aseptic procedures are used throughout the manufacturing process to prevent contamination. As such, all raw materials and solutions must be sterilized prior to use in the manufacturing process.

[1176] A master cell bank (MCB) is produced by sequential serial single colony isolation of the selected bacterial strain, to ensure no contaminants are present in the starting material. A sterile culture vessel containing sterile media (can be complex media, e.g., LB or MSB, or defined media, e.g., M9 supplemented with appropriate nutrients) is inoculated with a single well-isolated bacterial colony and the bacteria are allowed to replicate, e.g., by incubation at 37° C. with shaking. The bacteria are then prepared for cryopreservation by suspension in a solution containing a cryoprotective agent or agents.

[1177] Examples of cryoprotective agents include: proteins, such as human or bovine serum albumin, gelatin, and immunoglobulins; carbohydrates, including monosaccharides (e.g., galactose, D-mannose, sorbose, etc.) and their non-reducing derivatives (e.g., methylglucoside), disaccharides (e.g., trehalose, sucrose, and others), cyclodextrins, and polysaccharides (e.g., raffinose, maltodextrins, dextrans, etc.); amino-acids (e.g., glutamate, glycine, alanine, arginine or histidine, tryptophan, tyrosine, leucine, phenylalanine, etc.); methylamines, such as betaine; polyols, such as trihydric or higher sugar alcohols, e.g., glycerin, erythritol, glycerol, arabitol, xylitol, sorbitol, and mannitol; propylene glycol; polyethylene glycol; surfactants, e.g., Pluronic®; or organo-sulfur compounds, such as dimethyl sulfoxide (DMSO), and combinations thereof. Cryopreservation solutions can include one or more cryoprotective agents in a solution that also can contain salts (e.g., sodium chloride, potassium chloride, magnesium sulfate), and/or buffering agents, such as sodium phosphate, tris(hydroxymethyl)aminomethane (TRIS), 4-(2-hydroxyethyl)-1-piperazineethanesulfonic acid (HEPES), and other such buffering agents known to those of skill in the art.

[1178] Suspension of the bacteria in cryopreservation solution can be achieved either by addition of a concentrated cryoprotective agent or agents to the culture material to achieve a final concentration that preserves viability of the bacteria during the freezing and thawing process (e.g., 0.5% to 20% final concentration of glycerol), or by harvesting the bacteria (e.g., by centrifugation) and suspending in a cryopreservative solution containing the appropriate final concentration of cryoprotective agent(s). The suspension of bacteria in cryopreservation solution is then filled into appropriate sterile vials (plastic or glass) with a container closure system that is capable of maintaining closure integrity under frozen conditions (e.g., butyl stoppers and crimp seals). The vials of master cell bank are then frozen (either slowly by means of a controlled rate freezer, or quickly by means of placing directly into a freezer). The MCB is then stored frozen at a temperature that preserves long-term viability (e.g., at or below −60° C.). Thawed master cell bank material is thoroughly characterized to ensure identity, purity, and activity per regulation by the appropriate authorities.

[1179] Working cell banks (WCBs) are produced much the same way as the master cell bank, but the starting material is derived from the MCB. MCB material can be directly transferred into a fermentation vessel containing sterile media and expanded as above. The bacteria are then suspended in a cryopreservation solution, filled into containers, sealed, and frozen at or below −20° C. Multiple WCBs can be produced from MCB material, and WCB material can be used to make additional cell banks (e.g., a manufacturer's working cell bank (MWCB)). WCBs are stored frozen, and are characterized to ensure identity, purity, and activity. WCB material is typically the starting material used in the production of the drug substance of biologics such as engineered bacteria.

b. Drug Substance Manufacturing

[1180] Drug substance is manufactured using aseptic processes under cGMP, as described above. Working cell bank material is typically used as starting material for manufacturing of drug substance under cGMP, however, other cell banks can be used (e.g., MCB or MWCB). Aseptic processing is used for production of all cell therapies including bacterial cell-based therapies. The bacteria from the cell bank are expanded by fermentation; this can be achieved by production of a pre-culture (e.g., in a shake flask), or by direct inoculation of a fermenter. Fermentation is accomplished in a sterile bioreactor or flask that can be single-use disposable, or re-usable. Bacteria are harvested by concentration (e.g., by centrifugation, continuous centrifugation, or tangential flow filtration). Concentrated bacteria are purified from media components and bacterial metabolites by exchange of the media with buffer (e.g., by diafiltration). The bulk drug product is formulated and preserved as an intermediate (e.g., by freezing or drying), or is processed directly into a drug product. Drug substance is tested for identity, strength, purity, potency, and quality.

c. Drug Product Manufacturing

[1181] Drug product is defined as the final formulation of the active substance contained in its final container. Drug product is manufactured using aseptic processes under cGMP. Drug product is produced from drug substance. Drug substance is thawed or reconstituted if necessary, then formulated at the appropriate target strength. Because the active component of the drug product is live, engineered bacteria, the strength is determined by the number of colony forming units (CFUs) contained within the suspension. The bulk product is diluted in a final formulation appropriate for storage and use, as described below. Containers are filled and sealed with a container closure system, and the drug product is labeled. The drug product is stored at an appropriate temperature to preserve stability and is tested for identity, strength, purity, potency, and quality, and released for human use if it meets specified acceptance criteria.

### 2. Compositions

[1182] Pharmaceutically acceptable compositions are prepared in view of approvals for a regulatory agency or other agency, and/or prepared in accordance with generally recognized pharmacopeia for use in animals and in humans. The compositions can be prepared as solutions, suspensions, powders, or sustained release formulations. Typically, the compounds are formulated into pharmaceutical compositions using techniques and procedures well-known in the art (see, e.g., Ansel, Introduction to Pharmaceutical Dosage Forms, Fourth Edition, 1985, page 126). The formulation should suit the mode of administration.

[1183] Compositions can be formulated for administration by any route known to those of skill in the art, including intramuscular, intravenous, intradermal, intralesional, intraperitoneal, subcutaneous, intratumoral, epidural, nasal, oral, vaginal, rectal, topical, local, otic, inhalational, buccal (e.g., sublingual), and transdermal administration, or by any suitable route. Other modes of administration also are contemplated. Administration can be local, topical, or systemic, depending upon the locus of treatment. Local administration to an area in need of treatment can be achieved by, for example, but not limited to, local infusion during surgery, topical application, e.g., in conjunction with a wound dressing after surgery, by injection, by means of a catheter, by means of a suppository, or by means of an implant. Compositions also can be administered with other biologically active agents, either sequentially, intermittently, or in the same composition. Administration also can include controlled release systems, including controlled release formulations and device controlled release, such as by means of a pump.

[1184] The most suitable route in any given case depends on a variety of factors, such as the nature of the disease, the progress of the disease, the severity of the disease, and the particular composition which is used. Pharmaceutical compositions can be formulated in dosage forms appropriate for each route of administration. In particular, the compositions can be formulated into any suitable pharmaceutical preparations for systemic, local, intraperitoneal, oral, or direct administration. For example, the compositions can be formulated for administration subcutaneously, intramuscularly, intratumorally, intravenously, or intradermally. Administration methods can be employed to decrease the exposure of the active agent to degradative processes, such as immunological intervention via antigenic and immunogenic responses. Examples of such methods include local administration at the site of treatment, or continuous infusion.

[1185] The immunostimulatory bacteria can be formulated into suitable pharmaceutical preparations, such as solutions, suspensions, tablets, dispersible tablets, pills, capsules, powders, sustained release formulations, or elixirs, for oral administrations, as well as transdermal patch preparations, and dry powder inhalers. Typically, the compounds are formulated into pharmaceutical compositions using techniques and procedures well-known in the art (see, e.g., Ansel, Introduction to Pharmaceutical Dosage Forms, Fourth Edition, 1985, page 126). Generally, the mode of formulation is a function of the route of administration. The compositions can be formulated in dried (lyophilized or other forms of vitrification) or liquid form. Where the compositions are provided in dried form, they can be reconstituted just prior to use by addition of an appropriate buffer, for example, a sterile saline solution.

### 3. Formulations

a. Liquids, Injectables, Emulsions

[1186] The formulation generally is made to suit the route of administration. Parenteral administration, generally characterized by injection or infusion, either subcutaneously, intramuscularly, intratumorally, intravenously, or intradermally is contemplated herein. Preparations of bacteria for parenteral administration include suspensions ready for injection (direct administration), frozen suspensions that are thawed prior to use, dry soluble products, such as lyophilized powders, ready to be combined with a resuspension solution just prior to use, and emulsions. Dried thermostable formulations, such as lyophilized formulations, can be used for storage of unit doses for later use.

[1187] The pharmaceutical preparation can be in a frozen liquid form, for example, a suspension. If provided in frozen liquid form, the drug product can be provided as a concentrated preparation to be thawed and diluted to a therapeutically effective concentration before use.

[1188] The pharmaceutical preparations also can be provided in a dosage form that does not require thawing or dilution for use. Such liquid preparations can be prepared by conventional means with pharmaceutically acceptable additives, as appropriate, such as suspending agents (e.g., sorbitol, cellulose derivatives, or hydrogenated edible fats); emulsifying agents (e.g., lecithin or acacia); non-aqueous vehicles (e.g., almond oil, oily esters, or fractionated vegetable oils); and preservatives suitable for use with microbial therapeutics. The pharmaceutical preparations can be presented in dried form, such as lyophilized or spray-dried, for reconstitution with water or other sterile suitable vehicle before use.

[1189] Suitable excipients are, for example, water, saline, dextrose, or glycerol. The solutions can be either aqueous or non-aqueous. If administered intravenously, suitable carriers include physiological saline or phosphate buffered saline (PBS), and other buffered solutions used for intravenous hydration. For intratumoral administration, solutions containing thickening agents, such as glucose, polyethylene glycol, and polypropylene glycol, oil emulsions, and mixtures thereof can be appropriate to maintain localization of the injectant.

[1190] Pharmaceutical compositions can include carriers or other excipients. For example, pharmaceutical compositions provided herein can contain any one or more of a diluents(s), adjuvant(s), antiadherent(s), binder(s), coating(s), filler(s), flavor(s), color(s), lubricant(s), glidant(s), preservative(s), detergent(s), or sorbent(s), and a combination thereof, or a vehicle with which a modified therapeutic bacteria is administered. For example, pharmaceutically acceptable carriers or excipients used in parenteral preparations include aqueous vehicles, non-aqueous vehicles, isotonic agents, buffers, antioxidants, local anesthetics, suspending and dispersing agents, emulsifying agents, sequestering or chelating agents, and other pharmaceutically acceptable substances. Formulations, including liquid preparations, can be prepared by conventional means with pharmaceutically acceptable additives or excipients.

[1191] Pharmaceutical compositions can include carriers, such as a diluent, adjuvant, excipient, or vehicle, with which the compositions are administered. Examples of suitable pharmaceutical carriers are described in “Remington's Pharmaceutical Sciences” by E. W. Martin. Such compositions will contain a therapeutically effective amount of the compound or agent, generally in purified form or partially purified form, together with a suitable amount of carrier, so as to provide the form for proper administration to the patient. Such pharmaceutical carriers can be sterile liquids, such as water and oils, including those of petroleum, animal, vegetable, or synthetic origin, such as peanut oil, soybean oil, mineral oil, and sesame oil. Water is a typical carrier. Saline solutions and aqueous dextrose and glycerol solutions also can be employed as liquid carriers, particularly for injectable solutions. Compositions can contain along with an active ingredient: a diluent, such as lactose, sucrose, dicalcium phosphate, or carboxymethylcellulose; a lubricant, such as magnesium stearate, calcium stearate, and talc; and a binder, such as starch, natural gums, such as gum acacia, gelatin, glucose, molasses, polyvinylpyrrolidine, celluloses and derivatives thereof, povidone, crospovidone, and other such binders known to those of skill in the art. Suitable pharmaceutical excipients include starch, glucose, lactose, sucrose, gelatin, malt, rice, flour, chalk, silica gel, sodium stearate, glycerol monostearate, talc, sodium chloride, dried skim milk, glycerol, propylene, glycol, water, and ethanol. For example, suitable excipients are, for example, water, saline, dextrose, glycerol, or ethanol. A composition, if desired, also can contain other minor amounts of non-toxic auxiliary substances, such as wetting or emulsifying agents, pH buffering agents, stabilizers, solubility enhancers, and other such agents, such as, for example, sodium acetate, sorbitan monolaurate, triethanolamine oleate, and cyclodextrins.

[1192] Pharmaceutically acceptable carriers used in parenteral preparations include aqueous vehicles, non-aqueous vehicles, antimicrobial agents, isotonic agents, buffers, antioxidants, local anesthetics, suspending and dispersing agents, emulsifying agents, sequestering or chelating agents and other pharmaceutically acceptable substances. Examples of aqueous vehicles include Sodium Chloride Injection, Ringer's Injection, Isotonic Dextrose Injection, Sterile Water Injection, and Dextrose and Lactated Ringer's Injection. Non-aqueous parenteral vehicles include fixed oils of vegetable origin, cottonseed oil, corn oil, sesame oil, and peanut oil. Isotonic agents include sodium chloride and dextrose. Buffers include phosphate and citrate. Antioxidants include sodium bisulfate. Local anesthetics include procaine hydrochloride. Suspending and dispersing agents include sodium carboxymethylcellulose, hydroxypropyl methylcellulose, and polyvinylpyrrolidone. Emulsifying agents include, for example, polysorbates, such Polysorbate 80 (TWEEN 80). Sequestering or chelating agents of metal ions, such as EDTA, can be included. Pharmaceutical carriers also include polyethylene glycol, and propylene glycol for water miscible vehicles, and sodium hydroxide, hydrochloric acid, citric acid, or lactic acid, for pH adjustment. Non-anti-microbial preservatives can be included.

[1193] The pharmaceutical compositions also can contain other minor amounts of non-toxic auxiliary substances, such as wetting or emulsifying agents, pH buffering agents, stabilizers, solubility enhancers, and other such agents, such as, for example, sodium acetate, sorbitan monolaurate, triethanolamine oleate, and cyclodextrins. Implantation of a slow-release or sustained-release system, such that a constant level of dosage is maintained (see, e.g., U.S. Pat. No. 3,710,795), also is contemplated herein. The percentage of active compound contained in such parenteral compositions is highly dependent on the specific nature thereof, as well as the activity of the compound and the needs of the subject.

b. Dried Thermostable Formulations

[1194] The bacteria can be dried. Dried thermostable formulations, such as lyophilized or spray dried powders and vitrified glass, can be reconstituted for administration as solutions, emulsions and other mixtures. The dried thermostable formulations can be prepared from any of the liquid formulations, such as the suspensions, described above. The pharmaceutical preparations can be presented in lyophilized or vitrified form, for reconstitution with water or other suitable vehicle, before use.

[1195] The thermostable formulation is prepared for administration by reconstituting the dried compound with a sterile solution. The solution can contain an excipient which improves the stability or other pharmacological attribute of the active substance or reconstituted solution, prepared from the powder. The thermostable formulation is prepared by dissolving an excipient, such as dextrose, sorbitol, fructose, corn syrup, xylitol, glycerin, glucose, sucrose, or other suitable agent, in a suitable buffer, such as citrate, sodium or potassium phosphate, or other such buffer known to those of skill in the art. Then, the drug substance is added to the resulting mixture, and stirred until it is mixed. The resulting mixture is apportioned into vials for drying. Each vial will contain a single dosage, containing 1×10⁵ to 1×10¹¹ CFUs per vial. After drying, the product vial is sealed with a container closure system that prevents moisture or contaminants from entering the sealed vial. The dried product can be stored under appropriate conditions, such as at −20° C., 4° C., or room temperature. Reconstitution of this dried formulation with water or a buffer solution provides a formulation for use in parenteral administration. The precise amount depends upon the indication treated and selected compound. Such amount can be empirically determined.

### 4. Compositions for Other Routes of Administration

[1196] Depending upon the condition treated, other routes of administration in addition to parenteral, such as topical application, transdermal patches, and oral and rectal administration, also are contemplated herein. The suspensions and powders described above can be administered orally, or can be reconstituted for oral administration. Pharmaceutical dosage forms for rectal administration are rectal suppositories, capsules, and tablets and gel capsules for systemic effect. Rectal suppositories include solid bodies for insertion into the rectum which melt or soften at body temperature, releasing one or more pharmacologically or therapeutically active ingredients. Pharmaceutically acceptable substances in rectal suppositories are bases or vehicles and agents to raise the melting point. Examples of bases include cocoa butter (theobroma oil), glycerin-gelatin, CARBOWAX® (polyethylene glycol), and appropriate mixtures of mono-, di-, and triglycerides of fatty acids. Combinations of the various bases can be used. Agents to raise the melting point of suppositories include spermaceti and wax. Rectal suppositories can be prepared either by the compressed method, or by molding. The typical weight of a rectal suppository is about 2 to 3 grams. Tablets and capsules for rectal administration are manufactured using the same pharmaceutically acceptable substance and by the same methods as for formulations for oral administration. Formulations suitable for rectal administration can be provided as unit dose suppositories. These can be prepared by admixing the drug substance with one or more conventional solid carriers, for example, cocoa butter, and then shaping the resulting mixture.

[1197] For oral administration, pharmaceutical compositions can take the form of, for example, tablets or capsules prepared by conventional means with pharmaceutically acceptable excipients, such as binding agents (e.g., pregelatinized maize starch, polyvinyl pyrrolidone, or hydroxypropyl methylcellulose); fillers (e.g., lactose, microcrystalline cellulose, or calcium hydrogen phosphate); lubricants (e.g., magnesium stearate, talc, or silica); disintegrants (e.g., potato starch or sodium starch glycolate); or wetting agents (e.g., sodium lauryl sulfate). The tablets can be coated by methods well-known in the art.

[1198] Formulations suitable for buccal (sublingual) administration include, for example, lozenges containing the active compound in a flavored base, usually sucrose and acacia or tragacanth; and pastilles containing the compound in an inert base, such as gelatin and glycerin, or sucrose and acacia.

[1199] Topical mixtures are prepared as described for local and systemic administration. The resulting mixtures can be solutions, suspensions, emulsions or the like, and are formulated as creams, gels, ointments, emulsions, solutions, elixirs, lotions, suspensions, tinctures, pastes, foams, aerosols, irrigations, sprays, suppositories, bandages, dermal patches, or any other formulations suitable for topical administration.

[1200] The compositions can be formulated as aerosols for topical application, such as by inhalation (see, e.g., U.S. Pat. Nos. 4,044,126, 4,414,209, and 4,364,923, which describe aerosols for the delivery of a steroid useful for treatment of lung diseases). These formulations, for administration to the respiratory tract, can be in the form of an aerosol or solution for a nebulizer, or as a microfine powder for insufflation, alone or in combination with an inert carrier such as lactose. In such a case, the particles of the formulation will typically have diameters of less than 50 microns, or less than 10 microns.

[1201] The compounds can be formulated for local or topical application, such as for topical application to the skin and mucous membranes, such as in the eye, in the form of gels, creams, and lotions, and for application to the eye, or for intracisternal or intraspinal application. Topical administration is contemplated for transdermal delivery, and also for administration to the eyes or mucosa, or for inhalation therapies. Nasal solutions of the active compound alone, or in combination with other pharmaceutically acceptable excipients, also can be administered.

[1202] Formulations suitable for transdermal administration are provided. They can be provided in any suitable format, such as discrete patches adapted to remain in intimate contact with the epidermis of the recipient for a prolonged period of time. Such patches contain the active compound in an optionally buffered aqueous solution of, for example, 0.1 to 0.2 M concentration, with respect to the active compound. Formulations suitable for transdermal administration also can be delivered by iontophoresis (see, e.g., Tyle, P. (1986) Pharmaceutical Research 3(6):318-326), and typically take the form of an optionally buffered aqueous solution of the active compound.

[1203] Pharmaceutical compositions also can be administered by controlled release formulations and/or delivery devices (see e.g., U.S. Pat. Nos. 3,536,809; 3,598,123; 3,630,200; 3,845,770; 3,916,899; 4,008,719; 4,769,027; 5,059,595; 5,073,543; 5,120,548; 5,591,767; 5,639,476; 5,674,533; and 5,733,566).

### 5. Dosages and Administration

[1204] The compositions can be formulated as pharmaceutical compositions for single dosage or multiple dosage administration. The immunostimulatory bacteria can be included in an amount sufficient to exert a therapeutically useful effect in the absence of undesirable side effects on the patient treated. For example, the concentration of the pharmaceutically active compound is adjusted so that an injection provides an effective amount to produce the desired pharmacological effect. The therapeutically effective concentration can be determined empirically by testing the immunostimulatory bacteria in known in vitro and in vivo systems, such as by using the assays described herein or known in the art. For example, standard clinical techniques can be employed. In vitro assays and animal models can be employed to help identify optimal dosage ranges. The precise dose, which can be determined empirically, can depend on the age, weight, body surface area, and condition of the patient or animal, the particular immunostimulatory bacteria administered, the route of administration, the type of disease to be treated, and the seriousness of the disease.

[1205] Hence, it is understood that the precise dosage and duration of treatment is a function of the disease being treated, and can be determined empirically using known testing protocols, or by extrapolation from in vivo or in vitro test data. Concentrations and dosage values also can vary with the severity of the condition to be alleviated. It is to be further understood that, for any particular subject, specific dosage regimens should be adjusted over time according to the individual need and the professional judgment of the person administering or supervising the administration of the compositions, and that the concentration ranges set forth herein are exemplary only and are not intended to limit the scope or use of compositions and combinations containing them. The compositions can be administered hourly, daily, weekly, monthly, yearly, or once. Generally, dosage regimens are chosen to limit toxicity. It should be noted that the attending physician would know how to and when to terminate, interrupt, or adjust therapy to lower dosage due to toxicity, or bone marrow, liver, or kidney, or other tissue dysfunctions. Conversely, the attending physician would also know how to and when to adjust treatment to higher levels if the clinical response is not adequate (precluding toxic side effects).

[1206] The immunostimulatory bacteria are included in the composition in an amount sufficient to exert a therapeutically useful effect. For example, the amount is one that achieves a therapeutic effect in the treatment of a hyperproliferative disease or condition, such as cancer, or an amount that is effective as a vaccine, or to deliver mRNA. An exemplary dose can be about 1×10⁹ CFUs/m², but depends upon the route of administration. As shown in the table below, and noted above, higher doses can be administered. The data below, from an experiment in a mouse model, show that strains with the genome modifications as described herein have significantly improved tolerability, at least about 15-fold, compared to strain VNP20009, and, thus, can be dosed in higher amounts.

| | | | | Fold | Human |
|---|---|---|---|---|---|
| | | LD₅₀ in | | Improved | Equivalent |
| Strain | Strain | BALB/c | Fold | vs, | Dose |
| Name | Genotype | Mice | Attenuated | VNP2009 | (CFU/m²) |
| VNP20009 | ΔpurI + ΔmsbB | 4.4E6 | ~44,000 | — | 6.33E+08 |
| ΔFLG | ΔpurI + | 2.0E7 | 200,000 | 4.5 | 2.88E+09 |
| | ΔmsbB + | | | | |
| | ΔasdA + ΔFLG | | | | |
| ΔpagP | ΔpurI + | 1.4E7 | 139,000 | 3.2 | 2.00E+09 |
| | ΔmsbB + | | | | |
| | ΔasdA + ΔpagP | | | | |
| ΔFLG/ | ΔpurI + | >6.2E7 | >620,000 | >14 | >8.91E+09 |
| ΔpagP | ΔmsbB + | | | | |
| | ΔasdA + | | | | |
| | ΔFLG + ΔpagP | | | | |

[1207] The immunostimulatory bacteria described and provided herein can be administered by any suitable route, including, but not limited to, intravenously (IV), and mucosally, such as by nasal/intranasal administration, and by inhalation into the lung. This is particularly advantageous in embodiments in which the bacteria are used as vaccines against pathogens, such as bacterial and viral pathogens, including, for example, severe acute respiratory syndrome coronavirus 2 (SARS-CoV-2). The bacteria can be provided as a tablet, powder, or liquid, or other suitable formulation; they can be stored frozen, or refrigerated, or stored at room temperature, depending upon the formulation. Thus, the bacteria that provide mRNA can be administered via a variety of routes, and can be conveniently stored and formulated.

[1208] Pharmaceutically and therapeutically active compounds and derivatives thereof are typically formulated and administered in unit dosage forms or multiple dosage forms. Each unit dose contains a predetermined quantity of therapeutically active compound sufficient to produce the desired therapeutic effect, in association with the required pharmaceutical carrier, vehicle, or diluent. Unit dosage forms, include, but are not limited to, tablets, capsules, pills, powders, granules, parenteral suspensions, oral solutions or suspensions, and oil-in-water emulsions, containing suitable quantities of the compounds or pharmaceutically acceptable derivatives thereof. Unit dose forms can be contained in vials, ampoules and syringes, or individually packaged tablets or capsules. Unit dose forms can be administered in fractions or multiples thereof. A multiple dose form is a plurality of identical unit dosage forms packaged in a single container to be administered in segregated unit dose form. Examples of multiple dose forms include vials, bottles of tablets or capsules, or bottles of pints or gallons. Hence, multiple dose form is a multiple of unit doses that are not segregated in packaging. Generally, dosage forms or compositions containing active ingredient in the range of 0.005% to 100%, with the balance made up from non-toxic carrier, can be prepared. Pharmaceutical compositions can be formulated in dosage forms appropriate for each route of administration.

[1209] The unit-dose parenteral preparations are packaged in an ampoule, a vial, or a syringe with a needle. The volume of liquid solution or reconstituted powder preparation, containing the pharmaceutically active compound, is a function of the disease to be treated and the particular article of manufacture chosen for package. All preparations for parenteral administration must be sterile, as is known and practiced in the art.

[1210] As indicated, compositions provided herein can be formulated for any route known to those of skill in the art, including, but not limited to, subcutaneous, intramuscular, intravenous, intradermal, intralesional, intraperitoneal, epidural, vaginal, rectal, local, otic, or transdermal administration, or any route of administration. Formulations suited for such routes are known to one of skill in the art. Compositions also can be administered with other biologically active agents, either sequentially, intermittently, or in the same composition.

[1211] Pharmaceutical compositions can be administered by controlled release formulations and/or delivery devices (see, e.g., U.S. Pat. Nos. 3,536,809; 3,598,123; 3,630,200; 3,845,770; 3,847,770; 3,916,899; 4,008,719; 4,687,660; 4,769,027; 5,059,595; 5,073,543; 5,120,548; 5,354,556; 5,591,767; 5,639,476; 5,674,533; and 5,733,566). Various delivery systems are known and can be used to administer selected compositions, are contemplated for use herein, and such particles can be easily made.

### 6. Packaging and Articles of Manufacture

[1212] Also provided are articles of manufacture containing packaging materials, any pharmaceutical composition provided herein, and a label that indicates that the compositions are to be used for treatment of diseases or conditions as described herein. For example, the label can indicate that the treatment is for a tumor or for cancer.

[1213] Combinations of immunostimulatory bacteria described herein and another therapeutic agent also can be packaged in an article of manufacture. In one example, the article of manufacture contains a pharmaceutical composition containing the immunostimulatory bacteria composition and no further agent or treatment. In other examples, the article of manufacture contains another further therapeutic agent, such as a different anti-cancer agent. In this example, the agents can be provided together or separately, for packaging as articles of manufacture.

[1214] The articles of manufacture provided herein contain packaging materials. Packaging materials for use in packaging pharmaceutical products are well-known to those of skill in the art. See, for example, U.S. Pat. Nos. 5,323,907, 5,052,558, and 5,033,252, each of which is incorporated herein in its entirety. Examples of pharmaceutical packaging materials include, but are not limited to, blister packs, bottles, tubes, inhalers, pumps, bags, vials, containers, syringes, bottles, and any packaging material suitable for a selected formulation and intended mode of administration and treatment. Exemplary of articles of manufacture are containers, including single chamber and dual chamber containers. The containers include, but are not limited to, tubes, bottles, and syringes. The containers can further include a needle for intravenous administration.

[1215] The choice of package depends on the agents, and whether such compositions will be packaged together or separately. In general, the packaging is non-reactive with the compositions contained therein. In other examples, some of the components can be packaged as a mixture. In other examples, all components are packaged separately. Thus, for example, the components can be packaged as separate compositions that, upon mixing just prior to administration, can be directly administered together. Alternatively, the components can be packaged as separate compositions for administration separately.

[1216] Selected compositions including articles of manufacture thereof also can be provided as kits. Kits can include a pharmaceutical composition described herein, and an item for administration provided as an article of manufacture. The compositions can be contained in the item for administration or can be provided separately to be added later. The kit can, optionally, include instructions for application, including dosages, dosing regimens, and instructions for modes of administration. Kits also can include a pharmaceutical composition described herein and an item for diagnosis.

### I. Methods of Treatment and Uses

[1217] The methods provided herein include methods of administering or using the immunostimulatory bacteria, for treating subjects having a disease or condition whose symptoms can be ameliorated or lessened by administration of such bacteria, such as cancer. In particular examples, the disease or condition is a tumor or a cancer. Bacteria provided herein also can be used as vaccines and other such applications, discussed in sections above. In those instances, not only can the bacteria be administered as described in this section, as described with reference to their use as anti-cancer agents, but also by other routes that mimic the natural routes of entry of various pathogens. For example, as discussed in the above sections, for vaccination, such as against viruses, such as respiratory viruses, they can be administered by inhalation into the nose or lungs. These bacteria elicit T-cell responses and immune responses in the tissues in which they are administered, such as the nose, esophagus, and lungs, to promote in situ immune responses, resulting in memory T-cells that are antigen-specific, as well as B-cells, to provide long-term responses.

[1218] Additionally, methods of combination therapies with one or more additional agents for treatment, such as an anti-cancer agent or an anti-hyaluronan agent, also are provided. The bacteria can be administered by any suitable route, including, but not limited to, parenteral, systemic, topical, and local, such as intra-tumoral, intravenous, rectal, oral, intramuscular, mucosal, and other routes. Because of the modifications of the bacteria described herein, problems associated with systemic administration are solved. Formulations suitable for each route of administration are provided. The skilled person can establish suitable regimens and doses, and select routes of administration.

### 1. Diagnostics for Patient Selection for Treatment and for Monitoring Treatment

a. Patient Selection

[1219] Biomarkers can be used to identify patients who are likely to respond to therapy with the immunostimulatory bacteria provided herein. For example, the Adenosine Signature and the Myeloid Signature can be assessed by NanoString gene expression panels, and T-cell infiltration of tumors can be assessed by the Immunoscore® test, which is an in vitro diagnostic test used for predicting the risk of relapse in early stage colon cancer patients, by measuring the host immune response at a tumor site. Patients whose tumors or body fluids indicate an immune responsiveness or an immune response are more likely to respond to the treatment with the immunostimulatory bacteria provided herein.

[1220] Other biomarkers include tumor-infiltrating lymphocytes (TILs), CD73, CD39, TNAP (tissue-nonspecific alkaline phosphatase), CD38, CD68, PD-L1, and FoxP3. For example, tumors that can be treated with the immunostimulatory bacteria provided herein are T-cell excluded, exhibit high levels of purines/adenosine, and are unresponsive to PD-1/PD-L1 targeted therapies.

[1221] Gene expression profiles (GEPs), which can be determined using various NanoString gene expression panels, can be analyzed, for example, to identify the “adenosine signature” of tumors. High concentrations of adenosine are found in certain tumors, including colorectal carcinoma (CRC), non-small cell lung cancer (NSCLC), and pancreatic cancer, among others. Patients with tumors that exhibit high concentrations of purines/adenosine are likely to respond to therapy, since the immunostimulatory bacteria herein accumulate and replicate in purine/adenosine rich tumor microenvironments. Thus, the identification of tumors that express an “Adenosine Signature” can be used to predict patient response to therapy. Additionally, the immunostimulatory bacteria herein preferentially accumulate in and infect tumor-resident myeloid cells. Thus, the “Myeloid Signature” also can be used to predict patient response to therapy with the immunostimulatory bacteria. For example, it has been shown that the “Adenosine Signature” is nearly identical to the “Myeloid Signature” that is associated with poor response to atezolizumab (anti-PD-L1) monotherapy in renal cell carcinoma (RCC) patients, which is indicative of the role of adenosine in tumor escape from anti-PD-L 1 therapy (see, e.g., McDermott et al. (2018) Nature Medicine 24:749-757). Tumor-myeloid and tumor-adenosine NanoString signature panels are available and can be used for the selection of patients.

[1222] Macrophages limit T-cell infiltration into solid tumors and suppress their function, for example, in triple negative breast cancer (see, e.g., Keren et al. (2018) Cell 174:1373-1387). In certain cancers, such as CRC, macrophages dominate the intratumoral immune population and promote T-cell exclusion, and as a result, tumor-associated macrophages are associated with poor prognosis in CRC (see, e.g., Bindea et al. (2013) Immunity 39:782-795). Immunoscore®, a method to estimate the prognosis of cancer patients, based on the immune cells that infiltrate the cancer and surround it, can be used to measure T-cell exclusion or T-cell infiltration. Immunoscore® incorporates the effects of the host immune response into cancer classification and improves prognostic accuracy. It measures the density of two T lymphocyte populations (CD3/CD8, CD3/CD45RO, or CD8/CD45RO) in the center and at the periphery of the tumor, and provides a score ranging from 0 (I0), when low densities of both cell types are found in both regions, to Immunoscore 4 (I4), when high densities are found in both regions. Low infiltration of T lymphocytes results in a low Immunoscore®, which correlates with high risk, while high infiltration of T lymphocytes results in a high Immunoscore®, which correlates with low risk. Immunoscore®, thus, can be evaluated as a prospective biomarker to identify patients that will respond to therapy with the immunostimulatory bacteria provided herein. For example, T-cell poor/uninflamed tumors can be treated, because the immunostimulatory bacteria provided herein induce T-cell infiltration in cold tumors. Such tumors represent a high, unmet need population that is refractory to checkpoint inhibition.

[1223] Extracellular adenosine is produced by the sequential activities of membrane associated ectoenzymes, CD39 (ecto-nucleoside triphosphate diphosphohydrolase 1, or NTPDase1) and CD73 (ecto-5′-nucleotidase), which are expressed on tumor stromal cells, together producing adenosine by phosphohydrolysis of ATP or ADP that is produced from dead or dying cells. CD39 converts extracellular ATP (or ADP) to 5′-AMP, which is converted to adenosine by CD73. Expression of CD39 and CD73 on endothelial cells is increased under the hypoxic conditions of the tumor microenvironment, thereby increasing levels of adenosine. Thus, CD39 and CD73 can be used as biomarkers that indicate adenosine-rich tumors that can be targeted with the immunostimulatory bacteria provided herein.

[1224] CD38, also known as cyclic ADP ribose hydrolase, is a glycoprotein that is found on the surface of many immune cells, including CD4⁺ T-cells, CD8⁺ T-cells, B-lymphocytes, and natural killer cells. The loss of CD38, which is a marker of cell activation, is associated with impaired immune responses, and has been linked to leukemias, myelomas, and solid tumors. Additionally, increased expression of CD38 is an unfavorable diagnostic marker in chronic lymphocytic leukemia and is associated with increased disease progression. CD38 also is used as a target for daratumumab (Darzalex®), which has been approved for the treatment of multiple myeloma. CD68 is highly expressed by monocytes, circulating macrophages and by tissue macrophages (e.g., Kupffer cells, microglia). FoxP3 is involved in immune system responses, and acts as a regulator in the development and function of regulatory T-cells (or Tregs), which are immunosuppressive. In cancer, an excess of regulatory T-cell activity can prevent the immune system from destroying cancer cells. Thus, CD38, CD68 and FoxP3 also can be used as biomarkers for the selection of patients that are likely, to respond to therapy with the immunostimulatory bacteria herein.

b. Diagnostics to Assess or Detect Activity of the Immunostimulatory Bacteria are Indicative of the Effectiveness of Treatment

[1225] Biomarkers can be used to monitor the immunostimulatory bacteria following treatment. Biomarkers occur in tumor samples and/or in body fluid samples, such as blood, plasma, urine, saliva, and other fluids. Validated, peripheral blood biomarkers are used to evaluate the immune status of patients prior to and during treatment, to determine changes in the immune status, which correlate with the effectiveness of treatment. A change to, or an increase in, anti-tumor immune response status indicates that treatment with the immunostimulatory bacteria is having an effect. Immunomodulatory activity of the immunostimulatory bacteria provided herein, for example, in dose escalation and expansion studies, can be assessed. Examination of biomarkers reveals prognostic and predictive factors relating to disease (e.g., a tumor) status and its treatment, which can aid in monitoring treatment. Evaluating the tumor microenvironment, for example, provides insights into the mechanism of tumor responses to immunotherapies. Serum biomarkers to detect immunomodulatory activity of the immunostimulatory bacteria include, but are not limited to, CXCL10 (IP-10), CXCL9, interferon-β, interferon-γ, proinflammatory serum cytokines (e.g., IL-6, TNF-α, MCP-1/CCL1), and IL-18 binding protein.

[1226] CXCL10 and CXCL9 are chemokines that are necessary for CD8⁺ T-cell activation and trafficking to tumors, for example, in response to immunotherapies. In a phase 3 trial of nivolumab, an anti-PD-1 immune checkpoint inhibitor, for the treatment of previously treated patients with metastatic renal cell carcinoma (mRCC), immune pharmacodynamic effects that were shared by the majority of patients, irrespective of the dose administered, were identified. Assessment of the IFN-γ regulated serum chemokines CXCL9 and CXCL10 was performed using a multiplex panel based on Luminex technology (Myriad® Rules-Based Medicine (RBM)), and the results demonstrated that increased CXCL9 and CXCL10 serum levels, as well as increased transcription in the tumor, correlated with clinical response. Median increases in chemokine levels after treatment with nivolumab from baseline were 101% for CXCL9 and 37% for CXCL10 in peripheral blood (see, e.g., Choueiri et al. (2016) Clin. Cancer Res. 22(22):5461-5471). Additionally, treatment of patients with advanced solid tumors or lymphomas with the MK-1454 STING agonist (Merck), resulted in a dose-dependent increase in serum CXCL10 after intratumoral dosing (see, e.g., Harrington et al. ESMO Annual Meeting (2018)).

[1227] Dose-dependent increases in serum levels of IFN-β were observed following intratumoral dosing of the ADU-S100 STING agonist (Aduro) (see, e.g., Meric-Bernstam et al. ASCO Annual Meeting (2019)). Additionally, intravenous administration of VNP20009 induced a dose-dependent increase in the serum levels of the pro-inflammatory cytokines IL-6, TNF-α, IL-1β, and IL-12 (see, e.g., Toso et al. (2002) J. Clin. Oncol. 20(1):142-152).

[1228] IL-18 participates in protective immune responses to intracellular bacteria, fungi and viruses, and has demonstrated anti-tumor activity in preclinical models of lung cancer, breast cancer, sarcoma, and melanoma. The biological activity of IL-18 is modulated in a negative feedback loop by IL-18 binding protein (IL-18BP), induced through IFN-γ. Thus, serum levels of IL-18BP are predictive of clinical IFN-γ activity. The intravenous administration of recombinant human IL-18 (rhIL-18) to patients with advanced cancers resulted in increased serum concentrations of IL-18 binding protein in a dose-dependent manner, as well as increases in IFN-γ, GM-CSF, and soluble Fas ligand (see, e.g., Robertson et al. (2006) Clin. Cancer Res. 12(14):4265-4273). Additionally, the levels of IL-18BP in urine and serum were observed to correlate with tumor status in patients with prostate cancer; significant differences in urinary IL-18BP levels were found between cases with and without prostate cancer, and increased serum IL-18BP levels correlated with increasing prostate cancer Gleason score, demonstrating that elevated IL-18BP secretion from prostate cancer cells can be indicative of an attempt by cancer to escape immune surveillance (see, e.g., Fujita et al. (2011) Int. J. Cancer 129(2):424-432). Thus, IL-18BP can be used as a biomarker for tumor immune responses.

### 2. Tumors

[1229] The immunostimulatory bacteria, combinations, uses and methods provided herein are applicable to treating all types of tumors, including cancers, particularly solid tumors, including lung cancer, bladder cancer, non-small cell lung cancer, gastric cancers, head and neck cancers, ovarian cancer, liver cancer, pancreatic cancer, kidney cancer, breast cancer, colorectal cancer, and prostate cancer. The methods also can be used for treating hematological cancers.

[1230] Tumors and cancers subject to treatment by the immunostimulatory bacteria, compositions, combinations, uses and methods provided herein include, but are not limited to, those that originate in the immune system, skeletal system, muscles and heart, breast, pancreas, gastrointestinal tract, central and peripheral nervous system, renal system, reproductive system, respiratory system, skin, connective tissue systems, including joints, fatty tissues, and the circulatory system, including blood vessel walls. Examples of tumors that can be treated with the immunostimulatory bacteria provided herein include carcinomas, gliomas, sarcomas (including liposarcoma), adenocarcinomas, adenosarcomas, and adenomas. Such tumors can occur in virtually all parts of the body, including, for example, the breast, heart, lung, small intestine, colon, spleen, kidney, bladder, head and neck, ovary, prostate, brain, pancreas, skin, bone, bone marrow, blood, thymus, uterus, testicles, cervix, or liver.

[1231] Tumors of the skeletal system include, for example, sarcomas and blastomas such as osteosarcoma, chondrosarcoma, and chondroblastoma. Muscle and heart tumors include tumors of both skeletal and smooth muscles, e.g., leiomyomas (benign tumors of smooth muscle), leiomyosarcomas, rhabdomyomas (benign tumors of skeletal muscle), rhabdomyosarcomas, and cardiac sarcomas. Tumors of the gastrointestinal tract include, e.g., tumors of the mouth, esophagus, stomach, small intestine, and colon, and colorectal tumors, as well as tumors of gastrointestinal secretory organs, such as the salivary glands, liver, pancreas, and the biliary tract. Tumors of the central nervous system (CNS) include tumors of the brain, retina, and spinal cord, and can also originate in associated connective tissue, bone, blood vessels, or nervous tissue. Treatment of tumors of the peripheral nervous system are also contemplated. Tumors of the peripheral nervous system include malignant peripheral nerve sheath tumors. Tumors of the renal system include those of the kidneys, e.g., renal cell carcinoma, as well as tumors of the ureters and bladder. Tumors of the reproductive system include tumors of the cervix, uterus, ovary, prostate, testes, and related secretory glands. Tumors of the immune system include both blood-based and solid tumors, including lymphomas, e.g., both Hodgkin's and non-Hodgkin's lymphomas. Tumors of the respiratory system include tumors of the nasal passages, bronchi, and lungs. Tumors of the breast include, e.g., both lobular and ductal carcinomas.

[1232] Other examples of tumors that can be treated by the immunostimulatory bacteria and methods provided herein include Kaposi's sarcoma, CNS neoplasms, neuroblastomas, capillary hemangioblastomas, meningiomas and cerebral metastases, melanoma, gastrointestinal and renal carcinomas and sarcomas, rhabdomyosarcoma, glioblastoma (such as glioblastoma multiforme), and leiomyosarcoma. Examples of other cancers that can be treated as provided herein include, but are not limited to, lymphoma, blastoma, neuroendocrine tumors, mesothelioma, schwannoma, meningioma, melanoma, and leukemia or lymphoid malignancies. Examples of such cancers include hematologic malignancies, such as Hodgkin's lymphoma, non-Hodgkin's lymphomas (Burkitt's lymphoma, small lymphocytic lymphoma, chronic lymphocytic leukemia, mycosis fungoides, mantle cell lymphoma, follicular lymphoma, diffuse large B-cell lymphoma, marginal zone lymphoma, hairy cell leukemia, and lymphoplasmacytic leukemia), tumors of lymphocyte precursor cells, including B-cell acute lymphoblastic leukemia/lymphoma, and T-cell acute lymphoblastic leukemia/lymphoma, thymoma, tumors of the mature T and NK cells, including peripheral T-cell leukemias, adult T-cell leukemia/T-cell lymphomas and large granular lymphocytic leukemia, Langerhans cell histiocytosis, myeloid neoplasias such as acute myelogenous leukemias, including acute myeloid leukemia (AML) with maturation, AML without differentiation, acute promyelocytic leukemia, acute myelomonocytic leukemia, and acute monocytic leukemias, myelodysplastic syndromes, and chronic myeloproliferative disorders, including chronic myelogenous leukemia; tumors of the central nervous system such as glioma, glioblastoma, neuroblastoma, asdrocytoma, medulloblastoma, ependymoma, and retinoblastoma; solid tumors of the head and neck (e.g., nasopharyngeal cancer, salivary gland carcinoma, and esophageal cancer), lung (e.g., small-cell lung cancer, non-small cell lung cancer, adenocarcinoma of the lung, and squamous carcinoma of the lung), digestive system (e.g., gastric or stomach cancer, including gastrointestinal cancer, cancer of the bile duct or biliary tract, colon cancer, rectal cancer, colorectal cancer, and anal carcinoma), reproductive system (e.g., testicular, penile, prostate, uterine, vaginal, vulval, cervical, ovarian, and endometrial cancers), skin (e.g., melanoma, basal cell carcinoma, squamous cell cancer, actinic keratosis, and cutaneous melanoma), liver (e.g., liver cancer, hepatic carcinoma, hepatocellular cancer, and hepatoma), bone (e.g., osteoclastoma, and osteolytic bone cancers), additional tissues and organs (e.g., pancreatic cancer, bladder cancer, kidney or renal cancer, thyroid cancer, breast cancer, cancer of the peritoneum, and Kaposi's sarcoma), tumors of the vascular system (e.g., angiosarcoma and hemangiopericytoma), Wilms' tumor, retinoblastoma, osteosarcoma, and Ewing's sarcoma.

### 3. Administration

[1233] In practicing the uses and methods herein, immunostimulatory bacteria provided herein can be administered to a subject, including a subject having a tumor or having neoplastic cells, or a subject to be immunized. One or more steps can be performed prior to, simultaneously with, or after administration of the immunostimulatory bacteria to the subject, including, but not limited to, diagnosing the subject with a condition appropriate for administering immunostimulatory bacteria, determining the immunocompetence of the subject, immunizing the subject, treating the subject with a chemotherapeutic agent, treating the subject with radiation, or surgically treating the subject.

[1234] For embodiments that include administering immunostimulatory bacteria to a tumor-bearing subject for therapeutic purposes, the subject typically has previously been diagnosed with a neoplastic condition. Diagnostic methods also can include determining the type of neoplastic condition, determining the stage of the neoplastic condition, determining the size of one or more tumors in the subject, determining the presence or absence of metastatic or neoplastic cells in the lymph nodes of the subject, or determining the presence of metastases in the subject.

[1235] Some embodiments of the therapeutic methods for administering immunostimulatory bacteria to a subject can include a step of determining the size of the primary tumor or the stage of the neoplastic disease, and, if the size of the primary tumor is equal to or above a threshold volume, or if the stage of the neoplastic disease is at or above a threshold stage, an immunostimulatory bacterium is administered to the subject. In a similar embodiment, if the size of the primary tumor is below a threshold volume, or if the stage of the neoplastic disease is at or below a threshold stage, the immunostimulatory bacterium is not yet administered to the subject; such methods can include monitoring the subject until the tumor size or neoplastic disease stage reaches a threshold amount, and then administering the immunostimulatory bacterium to the subject. Threshold sizes can vary according to several factors, including rate of growth of the tumor, ability of the immunostimulatory bacterium to infect a tumor, and immunocompetence of the subject. Generally, the threshold size will be a size sufficient for an immunostimulatory bacterium to accumulate and replicate in or near the tumor, without being completely removed by the host's immune system, and will typically also be a size sufficient to sustain a bacterial infection for a time long enough for the host to mount an immune response against the tumor cells, typically about one week or more, about ten days or more, or about two weeks or more. Exemplary threshold stages are any stage beyond the lowest stage (e.g., Stage I or equivalent), or any stage where the primary tumor is larger than a threshold size, or any stage where metastatic cells are detected.

[1236] Any mode of administration of a microorganism to a subject can be used, provided the mode of administration permits the immunostimulatory bacteria to enter a tumor or metastasis. Modes of administration can include, but are not limited to, intravenous, intraperitoneal, subcutaneous, intramuscular, topical, intratumoral, multipuncture, inhalation, intranasal, oral, intracavity (e.g., administering to the bladder via a catheter, or administering to the gut by suppository or enema), aural, rectal, and ocular administration.

[1237] One skilled in the art can select any mode of administration compatible with the subject and the bacteria, and that also is likely to result in the bacteria reaching tumors and/or metastases. The route of administration can be selected by one skilled in the art according to any of a variety of factors, including the nature of the disease, the kind of tumor, and the particular bacteria contained in the pharmaceutical composition. Administration to the target site can be performed, for example, by ballistic delivery, or as a colloidal dispersion system, or systemic administration can be performed by injection into an artery.

[1238] The dosage regimen can be any of a variety of methods and amounts, and can be determined by one skilled in the art according to known clinical factors. A single dose can be therapeutically effective for treating a disease or disorder in which immune stimulation effects treatment. Exemplary of such stimulation is an immune response, that includes, but is not limited to, one or both of a specific immune response and non-specific immune response, both specific and non-specific responses, innate response, primary immune response, adaptive immunity, secondary immune response, memory immune response, immune cell activation, immune cell proliferation, immune cell differentiation, and cytokine expression.

[1239] As is known in the medical arts, dosages for a subject can depend on many factors, including the subject's species, size, body surface area, age, sex, immunocompetence, and general health, the particular bacteria to be administered, the duration and route of administration, the kind and stage of the disease, for example, the tumor size, and other compounds, such as drugs, being administered concurrently. In addition to the above factors, such levels can be affected by the infectivity of the bacteria and the nature of the bacteria, as can be determined by one skilled in the art. In the present methods, appropriate minimum dosage levels of bacteria can be levels sufficient for the bacteria to survive, grow and replicate in a tumor or metastasis. Exemplary minimum levels for administering a bacterium to a 65 kg human can include at least about 5×10⁶ colony forming units (CFUs), at least about 1×10⁷ CFUs, at least about 5×10⁷ CFUs, at least about 1×10⁸ CFUs, or at least about 1×10⁹ CFUs. In the present methods, appropriate maximum dosage levels of bacteria can be levels that are not toxic to the host, levels that do not cause splenomegaly of 3× or more, or levels that do not result in colonies or plaques in normal tissues or organs after about 1 day, or after about 3 days, or after about 7 days. Exemplary maximum levels for administering a bacterium to a 65 kg human can include no more than about 5×10¹¹ CFUs, no more than about 1×10¹¹ CFUs, no more than about 5×10¹⁰ CFUs, no more than about 1×10¹⁰ CFUs, or no more than about 1×10⁹ CFUs. The methods and uses provided herein can include a single administration of immunostimulatory bacteria to a subject, or multiple administrations of immunostimulatory bacteria to a subject, or others of a variety of regimens, including combination therapies with other anti-tumor therapeutics and/or treatments. These include, for example, cellular therapies, such as administration of modified immune cells; CAR-T therapy; CRISPR therapy; checkpoint inhibitors, such as antibodies (e.g., anti-PD-1 antibodies, anti-PD-L1 antibodies, and anti-CTLA-4 antibodies, and other such immunotherapies); chemotherapeutic compounds, such as nucleoside analogs; surgery; and radiotherapy. Other cancer therapies also include anti-VEGF, anti-VEGFR, anti-VEGFR2, anti-TGF-β, or anti-IL-6 antibodies, or fragments thereof, cancer vaccines, and oncolytic viruses.

[1240] In some embodiments, a single administration is sufficient to establish immunostimulatory bacteria in a tumor, where the bacteria can colonize, and can cause or enhance an anti-tumor response in the subject. In other embodiments, the immunostimulatory bacteria provided for use in the methods herein can be administered on different occasions, separated in time, typically by at least one day. Separate administrations can increase the likelihood of delivering a bacterium to a tumor or metastasis, where a previous administration may have been ineffective in delivering the bacterium to a tumor or metastasis. In embodiments, separate administrations can increase the locations on a tumor or metastasis where bacterial colonization/proliferation can occur, or can otherwise increase the titer of bacteria accumulated in the tumor, which can increase eliciting or enhancing a host's anti-tumor immune response.

[1241] When separate administrations are performed, each administration can be a dosage amount that is the same or different relative to other administration dosage amounts. In one embodiment, all administration dosage amounts are the same. In other embodiments, a first dosage amount can be a larger dosage amount than one or more subsequent dosage amounts, for example, at least 10× larger, at least 100× larger, or at least 1000× larger, than subsequent dosage amounts. In one example of a method of separate administrations, in which the first dosage amount is greater than one or more subsequent dosage amounts, all subsequent dosage amounts can be the same, smaller amount, relative to the first administration.

[1242] Separate administrations can include any number of two or more administrations, including two, three, four, five, or six administrations. One skilled in the art readily can determine the number of administrations to perform, or the desirability of performing one or more additional administrations, according to methods known in the art for monitoring therapeutic methods, and other monitoring methods provided herein. Accordingly, the methods provided herein include methods of providing to the subject one or more administrations of immunostimulatory bacteria, where the number of administrations can be determined by monitoring the subject, and, based on the results of the monitoring, determining whether or not to provide one or more additional administrations. Deciding whether or not to provide one or more additional administrations can be based on a variety of monitoring results, including, but not limited to, indication of tumor growth or inhibition of tumor growth, appearance of new metastases or inhibition of metastasis, the subject's anti-bacterial antibody titer, the subject's anti-tumor antibody titer, the overall health of the subject, and the weight of the subject.

[1243] The time period between administrations can be any of a variety of time periods. The time period between administrations can be a function of any of a variety of factors, including monitoring steps, as described in relation to the number of administrations, the time period for a subject to mount an immune response, the time period for a subject to clear bacteria from normal tissue, or the time period for bacterial colonization/proliferation in the tumor or metastasis. In one example, the time period can be a function of the time period for a subject to mount an immune response; for example, the time period can be more than the time period for a subject to mount an immune response, such as more than about one week, more than about ten days, more than about two weeks, or more than about a month. In another example, the time period can be less than the time period for a subject to mount an immune response, such as less than about one week, less than about ten days, less than about two weeks, or less than about a month. In another example, the time period can be a function of the time period for bacterial colonization/proliferation in the tumor or metastasis; for example, the time period can be more than the amount of time for a detectable signal to arise in a tumor or metastasis after administration of a microorganism expressing a detectable marker, such as about 3 days, about 5 days, about a week, about ten days, about two weeks, or about a month.

[1244] The methods used herein also can be performed by administering compositions, such as suspensions and other formulations, containing the immunostimulatory bacteria provided herein. Such compositions contain the bacteria and a pharmaceutically acceptable excipient or vehicle, as provided herein or known to those of skill in the art.

[1245] As discussed above, the uses and methods provided herein also can include administering one or more therapeutic compounds, such as anti-tumor compounds or other cancer therapeutics, to a subject, in addition to administering the immunostimulatory bacteria to the subject. The therapeutic compounds can act independently, or in conjunction with the immunostimulatory bacteria, for tumor therapeutic effects. Therapeutic compounds that can act independently include any of a variety of known chemotherapeutic compounds that can inhibit tumor growth, inhibit metastasis growth and/or formation, decrease the size of a tumor or metastasis, or eliminate a tumor or metastasis, without reducing the ability of the immunostimulatory bacteria to accumulate in a tumor, replicate in the tumor, and cause or enhance an anti-tumor immune response in the subject. Examples of such chemotherapeutic agents include, but are not limited to, alkylating agents, such as thiotepa and cyclophosphamide; alkyl sulfonates, such as busulfan, improsulfan, and piposulfan; androgens, such as calusterone, dromostanolone propionate, epitiostanol, mepitiostane, and testolactone; anti-adrenals, such as aminoglutethimide, mitotane, and trilostane; anti-androgens, such as flutamide, nilutamide, bicalutamide, leuprolide, and goserelin; antibiotics, such as aclacinomycin, actinomycin, anthramycin, azaserine, bleomycin, cactinomycin, calicheamicin, carubicin, carminomycin, carzinophilin, chromomycin, dactinomycin, daunorubicin, detorubicin, 6-diazo-5-oxo-L-norleucine, doxorubicin, epirubicin, esorubicin, idarubicin, marcellomycin, mitomycins, mycophenolic acid, nogalamycin, olivomycins, peplomycin, porfiromycin, puromycin, quelamycin, rodorubicin, streptonigrin, streptozocin, tubercidin, ubenimex, zinostatin, and zorubicin; anti-estrogens, including, for example, tamoxifen, raloxifene, aromatase inhibiting 4(5)-imidazoles, 4-hydroxytamoxifen, trioxifene, keoxifene, LY 117018, onapristone, and toremifene (Fareston®); anti-metabolites, such as methotrexate and 5-fluorouracil (5-FU); folic acid analogues, such as denopterin, methotrexate, pteropterin, and trimetrexate; aziridines, such as benzodepa, carboquone, meturedepa, and uredepa; ethylenimines and methylmelamines, including altretamine, triethylenemelamine, triethylenephosphoramide, triethylenethiophosphoramide, and trimethylol melamine; folic acid replenishers, such as folinic acid; nitrogen mustards, such as chlorambucil, chlornaphazine, chlorophosphamide, estramustine, ifosfamide, mechlorethamine, mechlorethamine oxide hydrochloride, melphalan, novembichin, phenesterine, prednimustine, trofosfamide, and uracil mustard; nitrosoureas, such as carmustine, chlorozotocin, fotemustine, lomustine, nimustine, and ranimustine; platinum analogs, such as cisplatin and carboplatin; vinblastine; platinum; proteins, such as arginine deiminase and asparaginase; purine analogs, such as fludarabine, 6-mercaptopurine, thiamiprine, and thioguanine; pyrimidine analogs, such as ancitabine, azacitidine, 6-azauridine, carmofur, cytarabine, dideoxyuridine, doxifluridine, enocitabine, floxuridine, and 5-FU; taxanes, such as paclitaxel and docetaxel, and albuminated forms thereof (i.e., nab-paclitaxel and nab-docetaxel); topoisomerase inhibitors, such as RFS-2000; thymidylate synthase inhibitors, such as Tomudex®; and additional chemotherapeutics, including aceglatone; aldophosphamide glycoside; aminolevulinic acid; amsacrine; bestrabucil; bisantrene; edatrexate; defosfamide; demecolcine; diaziquone; difluoromethylornithine (DFMO); eflornithine; elliptinium acetate; etoglucid; gallium nitrate; hydroxyurea; lentinan; lonidamine; mitoguazone; mitoxantrone; mopidamol; nitracrine; pentostatin; phenamet; pirarubicin; podophyllinic acid; 2-ethylhydrazide; procarbazine; PSK®; razoxane; sizofiran; spirogermanium; tenuazonic acid; triaziquone; 2,2′,2″-trichlorotriethylamine; urethan; vindesine; dacarbazine; mannomustine; mitobronitol; mitolactol; pipobroman; gacytosine; arabinoside (“Ara-C”); cyclophosphamide; thiotepa; chlorambucil; gemcitabine; 6-thioguanine; mercaptopurine; methotrexate; etoposide (VP-16); ifosfamide; mitomycin C; mitoxantrone; vincristine; vinorelbine; Navelbine; Novantrone; teniposide; daunomycin; aminopterin; Xeloda®; ibandronate; CPT-11; retinoic acid; esperamycins; capecitabine; and topoisomerase inhibitors, such as irinotecan. Pharmaceutically acceptable salts, acids, or derivatives of any of the above also can be used.

[1246] Therapeutic compounds that act in conjunction with the immunostimulatory bacteria include, for example, compounds that increase the immune response eliciting properties of the bacteria, e.g., by increasing expression of encoded therapeutic products, such as cytokines, chemokines, co-stimulatory molecules, proteins that constitutively induce type I IFNs, RNAi molecules that inhibit, suppress, or disrupt expression of checkpoint gene(s), a checkpoint inhibitor antibody and antibodies or fragments thereof against other targets, or compounds that can further augment bacterial colonization/proliferation. For example, a gene expression-altering compound can induce or increase transcription of a gene in a bacterium, such as an exogenous gene encoded on the plasmid, thereby provoking an immune response. Any of a wide variety of compounds that can alter gene expression are known in the art, including IPTG and RU486. Exemplary genes whose expression can be up-regulated include those encoding proteins and RNA molecules, including toxins, enzymes that can convert a prodrug to an anti-tumor drug, cytokines, transcription regulating proteins, shRNA, siRNA, and ribozymes. In other embodiments, therapeutic compounds that can act in conjunction with the immunostimulatory bacteria to increase the colonization/proliferation or immune response eliciting properties of the bacteria, are compounds that can interact with a bacterially-encoded gene product, and such interaction can result in an increased killing of tumor cells or an increased anti-tumor immune response in the subject. A therapeutic compound that can interact with a bacterially-encoded gene product can include, for example, a prodrug or other compound that has little or no toxicity, or other biological activity in its subject-administered form, but after interaction with a bacterially-encoded gene product, the compound can develop a property that results in tumor cell death, including but not limited to, cytotoxicity, the ability to induce apoptosis, or the ability to trigger an immune response. A variety of prodrug-like substances are known in the art, including ganciclovir, 5-fluorouracil, 6-methylpurine deoxyriboside, cephalosporin-doxorubicin, 4-[(2-chloroethyl)(2-mesuloxyethyl)amino]benzoyl-L-glutamic acid, acetaminophen, indole-3-acetic acid, CB1954, 7-ethyl-10-[4-(1-piperidino)-1-piperidino]carbonyloxycamptothecin, bis-(2-chloroethyl)amino-4-hydroxyphenylaminomethanone 28, 1-chloromethyl-5-hydroxy-1,2-dihyro-3H-benz[e]indole, epirubicin-glucuronide, 5′-deoxy5-fluorouridine, cytosine arabinoside, and linamarin.

### 4. Monitoring

[1247] The methods provided herein can further include one or more steps of monitoring the subject, monitoring the tumor, and/or monitoring the immunostimulatory bacteria administered to the subject. Any of a variety of monitoring steps can be included in the methods provided herein, including, but not limited to, monitoring tumor size, monitoring the presence and/or size of metastases, monitoring the subject's lymph nodes, monitoring the subject's weight or other health indicators, including blood or urine markers, monitoring anti-bacterial antibody titer, monitoring bacterial expression of a detectable gene product, and directly monitoring bacterial titer in a tumor, tissue, or organ of a subject.

[1248] The purpose of the monitoring can be simply for assessing the health state of the subject, or the progress of therapeutic treatment of the subject, or can be for determining whether or not further administration of the same or a different immunostimulatory bacterium is warranted, or for determining when or whether or not to administer a compound to the subject where the compound can act to increase the efficacy of the therapeutic method, or the compound can act to decrease the pathogenicity of the bacteria administered to the subject.

[1249] In some embodiments, the methods provided herein can include monitoring one or more bacterially-expressed genes. Bacteria, such as those provided herein or otherwise known in the art, can express one or more detectable gene products, including but not limited to, detectable proteins.

[1250] As provided herein, measurement of a detectable gene product expressed in a bacterium can provide an accurate determination of the level of bacteria present in the subject. As further provided herein, measurement of the location of the detectable gene product, for example, by imaging methods, including tomographic methods, can determine the localization of the bacteria in the subject. Accordingly, the methods provided herein that include monitoring a detectable bacterial gene product can be used to determine the presence or absence of the bacteria in one or more organs or tissues of a subject, and/or the presence or absence of the bacteria in a tumor or metastases of a subject. Further, the methods provided herein that include monitoring a detectable bacterial gene product can be used to determine the titer of bacteria present in one or more organs, tissues, tumors, or metastases. Methods that include monitoring the localization and/or titer of bacteria in a subject can be used for determining the pathogenicity of bacteria, since bacterial infection, and particularly the level of infection, of normal tissues and organs can indicate the pathogenicity of the bacteria. The methods that include monitoring the localization and/or titer of the immunostimulatory bacteria in a subject can be performed at multiple time points and, accordingly, can determine the rate of bacterial replication in a subject, including the rate of bacterial replication in one or more organs or tissues of a subject; accordingly, methods that include monitoring a bacterial gene product can be used for determining the replication competence of the bacteria. The methods provided herein also can be used to quantitate the amount of immunostimulatory bacteria present in a variety of organs or tissues, and tumors or metastases, and can thereby indicate the degree of preferential accumulation of the bacteria in a subject; accordingly, the bacterial gene product monitoring can be used in methods of determining the ability of the bacteria to accumulate in tumors or metastases, in preference to normal tissues or organs. Since the immunostimulatory bacteria used in the methods provided herein can accumulate in an entire tumor or can accumulate at multiple sites in a tumor, and can also accumulate in metastases, the methods provided herein for monitoring a bacterial gene product can be used to determine the size of a tumor, or the number of metastases present in a subject. Monitoring such presence of a bacterial gene product in a tumor or metastasis over a range of time can be used to assess changes in the tumor or metastasis, including growth or shrinking of a tumor, or development of new metastases, or disappearance of metastases, and also can be used to determine the rate of growth or shrinking of a tumor, or the rate of development of new metastases or disappearance of metastases, or the change in the rate of growth or shrinking of a tumor, or the change in the rate of development of new metastases or disappearance of metastases. Accordingly, monitoring a bacterial gene product can be used for monitoring a neoplastic disease in a subject, or for determining the efficacy of treatment of a neoplastic disease, by determining the rate of growth or shrinking of a tumor, or the development of new metastases or disappearance of metastases, or the change in the rate of growth or shrinking of a tumor, or the development of new metastases or disappearance of metastases.

[1251] Any of a variety of detectable proteins can be detected by monitoring, exemplary of which are any of a variety of fluorescent proteins (e.g., green fluorescent proteins), any of a variety of luciferases, transferrin, or other iron-binding proteins; or receptors, binding proteins, and antibodies, where a compound that specifically binds the receptor, binding protein or antibody can be a detectable agent, or can be labeled with a detectable substance (e.g., a radionuclide or imaging agent).

[1252] Tumor and/or metastasis size can be monitored by any of a variety of methods known in the art, including external assessment methods, or tomographic or magnetic imaging methods. In addition to the methods known in the art, methods provided herein, for example, monitoring bacterial gene expression, can be used for monitoring tumor and/or metastasis size.

[1253] Monitoring size over several time points can provide information regarding the increase or decrease in the size of a tumor or metastasis, and can also provide information regarding the presence of additional tumors and/or metastases in the subject. Monitoring tumor size over several time points can provide information regarding the development of a neoplastic disease in a subject, including the efficacy of treatment of a neoplastic disease in a subject.

[1254] The methods provided herein also can include monitoring the antibody titer in a subject, including antibodies produced in response to administration of the immunostimulatory bacteria to a subject. The bacteria administered in the methods provided herein can elicit an immune response to endogenous bacterial antigens. The bacteria administered in the methods provided herein also can elicit an immune response to exogenous genes expressed by the bacteria. The bacteria administered in the methods provided herein also can elicit an immune response to tumor antigens. Monitoring antibody titer against bacterial antigens, bacterially-expressed exogenous gene products, or tumor antigens can be used to monitor the toxicity of the bacteria, to monitor the efficacy of treatment methods, or to monitor the level of gene product(s) or antibodies for production and/or harvesting.

[1255] Monitoring antibody titer can be used to monitor the toxicity of the bacteria. Antibody titer against a bacteria can vary over the time period after administration of the bacteria to the subject, where at some particular time points, a low anti-(bacterial antigen) antibody titer can indicate a lower toxicity, while at other time points, a high anti-(bacterial antigen) antibody titer can indicate a higher toxicity. The bacteria used in the methods provided herein can be immunogenic, and can, therefore, elicit an immune response soon after administering the bacteria to the subject. Generally, immunostimulatory bacteria against which the immune system of a subject can mount a strong immune response can be bacteria that have low toxicity when the subject's immune system can remove the bacteria from all normal organs or tissues. Thus, in some embodiments, a high antibody titer against bacterial antigens soon after administering the bacteria to a subject can indicate low toxicity of the bacteria.

[1256] In other embodiments, monitoring antibody titer can be used to monitor the efficacy of treatment methods. In the methods provided herein, antibody titer, such as anti-(tumor antigen) antibody titer, can indicate the efficacy of a therapeutic method, such as a therapeutic method to treat neoplastic disease. Therapeutic methods provided herein can include causing or enhancing an immune response against a tumor and/or metastasis. Thus, by monitoring the anti-(tumor antigen) antibody titer, it is possible to monitor the efficacy of a therapeutic method in causing or enhancing an immune response against a tumor and/or metastasis.

[1257] In other embodiments, monitoring antibody titer can be used for monitoring the level of gene product(s) or antibodies for production and/or harvesting. As provided herein, methods can be used for producing proteins, RNA molecules or other compounds, by expressing an exogenous gene in a microorganism that has accumulated in a tumor, in the tumor microenvironment, and/or in tumor-resident immune cells. Monitoring antibody titer against the protein, RNA molecule, or other compound can indicate the level of production of the protein, RNA molecule, or other compound by the tumor-accumulated microorganism, and also, can directly indicate the level of antibodies specific for such a protein, RNA molecule, or other compound.

[1258] The methods provided herein also can include methods of monitoring the health of a subject. Some of the methods provided herein are therapeutic methods, including neoplastic disease therapeutic methods. Monitoring the health of a subject can be used to determine the efficacy of the therapeutic method, as is known in the art. The methods provided herein also can include a step of administering to a subject an immunostimulatory bacterium, as provided herein. Monitoring the health of a subject can be used to determine the pathogenicity of an immunostimulatory bacterium administered to a subject. Any of a variety of health diagnostic methods for monitoring disease, such as neoplastic disease, infectious disease, or immune-related disease, can be monitored, as is known in the art. For example, the weight, blood pressure, pulse, breathing, color, temperature, or other observable state of a subject can indicate the health of a subject. In addition, the presence, or absence, or level of one or more components in a sample from a subject can indicate the health of a subject. Typical samples can include blood and urine samples, where the presence, or absence, or level of one or more components can be determined by performing, for example, a blood panel or a urine panel diagnostic test. Exemplary components indicative of a subject's health include, but are not limited to, white blood cell count, hematocrit, and c-reactive protein concentration.

[1259] The methods provided herein can include monitoring a therapy, where therapeutic decisions can be based on the results of the monitoring. Therapeutic methods provided herein can include administering to a subject immunostimulatory bacteria, where the bacteria can preferentially accumulate in a tumor, the tumor microenvironment, or in tumor-resident immune cells, and/or in metastases, and where the bacteria can cause or enhance an anti-tumor immune response. Such therapeutic methods can include a variety of steps, including multiple administrations of a particular immunostimulatory bacterium, administration of a second immunostimulatory bacterium, or administration of a therapeutic compound. Determination of the amount, timing, or type of immunostimulatory bacteria or compound to administer to the subject can be based on one or more results from monitoring the subject. For example, the antibody titer in a subject can be used to determine whether or not it is desirable to administer an immunostimulatory bacterium and, optionally, a compound, the quantity of bacteria and/or compound to administer, and the type of bacteria and/or compound to administer, where, for example, a low antibody titer can indicate the desirability of administering an additional immunostimulatory bacterium, a different immunostimulatory bacterium, and/or a therapeutic compound, such as a compound that induces bacterial gene expression, or a therapeutic compound that is effective independent of the immunostimulatory bacteria.

[1260] In another example, the overall health state of a subject can be used to determine whether or not it is desirable to administer an immunostimulatory bacterium and, optionally, a compound, the quantity of bacterium and/or compound to administer, and the type of bacterium and/or compound to administer, where, for example, determining that the subject is healthy can indicate the desirability of administering additional bacteria, different bacteria, or a therapeutic compound, such as a compound that induces bacterial gene/genetic payload/therapeutic product expression. In another example, monitoring a detectable bacterially-expressed gene product can be used to determine whether it is desirable to administer an immunostimulatory bacterium and, optionally, a compound, the quantity of bacterium and/or compound to administer, and the type of bacterium and/or compound to administer, where, for example, determining that the subject is healthy can indicate the desirability of administering additional bacteria, different bacteria, or a therapeutic compound, such as a compound that induces bacterial gene/genetic payload/therapeutic product expression. Such monitoring methods can be used to determine whether or not the therapeutic method is effective, whether or not the therapeutic method is pathogenic to the subject, whether or not the bacteria have accumulated in a tumor or metastasis, and whether or not the bacteria have accumulated in normal tissues or organs. Based on such determinations, the desirability and form of further therapeutic methods can be derived.

[1261] In another example, monitoring can determine whether or not immunostimulatory bacteria have accumulated in a tumor or metastasis of a subject. Upon such a determination, a decision can be made to further administer additional bacteria, a different immunostimulatory bacterium, and, optionally, a compound to the subject.

### J. Examples

[1262] The following examples are included for illustrative purposes only and are not intended to limit the scope of the invention.

### Example 1

### Auxotrophic Strains of S. typhimurium

### The Salmonella Strain YS1646 is Auxotrophic for Adenosine

[1263] Strains provided herein are engineered to be auxotrophic for adenosine. As a result, they are attenuated in vivo because they are unable to replicate in the low adenosine concentrations of normal tissue, and colonization occurs primarily in the solid tumor microenvironment (TME), where adenosine levels are high. The Salmonella strain YS1646 is a derivative of the wild-type strain ATCC 14028, and was engineered to be auxotrophic for purines due to disruption of the purI gene (synonymous with purM) (see, e.g., Low et al. (2004) Methods Mol. Med. 90:47-60). Subsequent analysis of the entire genome of YS1646 demonstrated that the purI gene was not in fact deleted, but was instead disrupted by a chromosomal inversion (see, e.g., Broadway et al. (2014) J. Biotechnol. 192:177-178), and that the entire gene is still contained within two parts of the YS1646 chromosome that is flanked by insertion sequences, one of which has an active transposase. The presence of the complete genetic sequence of the purI gene, disrupted by means of a chromosomal reengagement, leaves open the possibility of reversion to a wild-type gene. While it has previously been demonstrated that the purine auxotrophy of YS1646 was stable after >140 serial passages in vitro, it was not clear what the reversion rate is (see, e.g., Clairmont et al. (2000) J. Infect. Dis. 181:1996-2002).

[1264] It is shown herein that, when provided with adenosine, strain YS1646 is able to replicate in minimal medium, whereas the wild-type parental strain, ATCC 14028 can grow in minimal media that is not supplemented with adenosine. Strain YS1646 was grown overnight in lysogeny broth (LB) medium, washed with M9 minimal medium, and diluted into M9 minimal medium containing no adenosine, or increasing concentrations of adenosine. Growth was measured using a SpectraMax® M3 Spectrophotometer (Molecular Devices) at 37° C., reading the OD₆₀₀ every 15 minutes.

[1265] The results showed that, unlike a wild-type strain (ATCC 14028), which was able to grow in all concentrations of adenosine, strain YS1646 only was able to replicate when adenosine was provided at concentrations ranging from 11 to 300 micromolar, and was completely unable to replicate in M9 alone, or in M9 supplemented with 130 nanomolar adenosine. These data demonstrate that purI mutants are able to replicate at concentrations of adenosine that are found in the tumor microenvironment, but not at concentrations found in normal tissues. Engineered adenosine auxotrophic strains exemplified herein include strains in which all or portions of the purI open reading frame are deleted from the chromosome to prevent reversion to wild-type. Such gene deletions can be achieved by any method known to one of skill in the art, including the lambda red system, as described below.

### The Salmonella Strain YS1646 is Auxotrophic for ATP

[1266] In addition to the purine and adenosine auxotrophy, it was determined whether the purI-deleted strain also can scavenge ATP. ATP accumulates to high levels in the tumor microenvironment, due to leakage from dying tumor cells. It is shown herein that, when provided with ATP, strain YS1646 is able to replicate in minimal media, but is unable to grow when not supplemented with ATP. To demonstrate this, strain YS1646 was grown overnight in LB medium, washed with M9 minimal medium, and diluted into M9 minimal medium containing no ATP, or increasing concentrations of ATP (Fisher). Growth was measured using a SpectraMax® M3 Spectrophotometer (Molecular Devices) at 37° C., reading the OD₆₀₀ every 15 minutes. The results demonstrated that strain YS1646 is able to replicate when ATP is provided at concentrations of 0.012 mM, but not in M9 alone.

### Example 2

### Defects in Intracellular Replication are Attributed to the msbB Mutation

[1267] The YS1646 strain contains mutations in purI, which limits replication to sites containing high concentrations of purines, adenosine, or ATP, and mutations in msbB, which alters the lipopolysaccharide (LPS) surface coat in order to reduce TLR4-mediated pro-inflammatory signaling. It also has been established that, unlike wild-type Salmonella, strain YS1646 is unable to replicate in macrophages. Experiments were performed to determine which of these genetic mutations is responsible for conferring that phenotype within the wild-type strain, ATCC 14028.

[1268] In this assay, mouse RAW macrophage cells (InvivoGen, San Diego, Ca.) were infected with wild-type Salmonella strains containing deletions in purI, msbB, or both, at a multiplicity of infection (MOI) of approximately 5 bacteria per cell for 30 minutes, then the cells were washed with PBS, and medium containing gentamicin was added to kill extracellular bacteria. Intracellular bacteria are not killed by gentamicin, as it cannot cross the cell membrane. At various time points after infection, cell monolayers were lysed by osmotic shock with water, and the cell lysates were diluted and plated on LB agar to enumerate surviving colony forming units (CFUs).

[1269] As shown in the table below, wild-type Salmonella strains containing only the purI⁻ mutation still were able to replicate. This explains why there is only a modest improvement in tolerability observed with the purI deletion alone, while achieving a high degree of specificity to the tumor microenvironment. Strains containing only the msbB⁻ mutation, as well as strains containing the purI⁻ and msbB⁻ mutations, were unable to replicate, and were rapidly cleared from cells within 48 hours.

| | CFUs/Well | | | | | |
|---|---|---|---|---|---|---|
| | ATCC 14028 | | ATCC 14028 | | ATCC 14028 | |
| Hours | ΔpurI | | ΔpurI/ΔmsbB | | ΔmsbB | |
| 1 | 104000 | 108000 | 68000 | 68000 | 88000 | 40000 |
| 2.5 | 5600 | 6000 | 760 | 960 | 3200 | 3200 |
| 5 | 5600 | 4000 | 1120 | 880 | 800 | 680 |
| 27 | 11200 | 5600 | 4 | 4 | 20 | 4 |

### Example 3

### Salmonella asd Gene Knockout Strain Engineering and Characterization

[1270] Strain YS1646Δasd was prepared. It is an attenuated Salmonella typhimurium strain derived from strain YS1646 (which can be purchased from ATCC, Catalog #202165) that has been engineered to have a deletion in the asd gene. In this example, the Salmonella typhimurium strain YS1646Δasd was engineered using modifications of the method of Datsenko and Wanner (Proc. Natl. Acad. Sci. U.S.A. 97:6640-6645 (2000)), as described below.

Introduction of the Lambda Red Helper Plasmid into Strain YS1646

[1271] The YS1646 strain was prepared to be electrocompetent as described previously (Sambrook J. (1998) Molecular Cloning, A Laboratory Manual, 2^{nd} Ed, Cold Spring Harbor, NY. Cold Spring Harbor Laboratory), by growing a culture in LB and concentrating 100-fold, and then washing three times with ice-cold 10% glycerol. The electrocompetent strain was electroporated with the Lambda red helper plasmid pKD46 (SEQ ID NO:218), using a 0.2 cm gap cuvette at the following settings: 2.5 kV, 186 ohms, and 50 μF. Transformants carrying pKD46 were grown in 5 mL SOC medium with ampicillin and 1 mM L-arabinose at 30° C., and selected on LB agar plates containing ampicillin. A YS1646 clone containing the lambda red helper plasmid pKD46 then was made electrocompetent, as described above for strain YS1646.

### Construction of asd Gene Knockout Cassette

[1272] The asd gene from the genome of strain YS1646 (Broadway et al. (2014) J. Biotechnology 192:177-178) was used for designing the asd gene knockout cassette. A plasmid containing 204 and 203 base pairs (bps) of homology to the left hand and right hand regions, respectively, of the asd gene, was transformed into DH5-alpha competent cells (Thermo Fisher Scientific). A kanamycin gene cassette flanked by loxP sites was cloned into this plasmid. The asd gene knockout cassette then was PCR amplified using primers asd-1 and asd-2 (see, Table 1), and gel purified.

### Deletion of asd Gene

[1273] The YS1646 strain carrying plasmid pKD46 was electroporated with the gel-purified linear asd gene knock-out cassette. Electroporated cells were recovered in SOC medium and plated onto LB agar plates supplemented with kanamycin (20 μg/mL) and diaminopimelic acid (DAP, 50 μg/mL). During this step, lambda red recombinase induces homologous recombination of the chromosomal asd gene with the kan cassette (due to the presence of homologous flanking sequences upstream and downstream of the chromosomal asd gene), and knockout of the chromosomal copy of the asd gene occurs. The presence of the disrupted asd gene in the selected kanamycin-resistant clones was confirmed by PCR amplification, with primers from the YS1646 genome flanking the sites of disruption (primer asd-3), and from the multi-cloning site (primer scFv-3) (see, Table 1). Colonies were also replica plated onto LB plates, with and without supplemental DAP, to demonstrate DAP auxotrophy. All clones with the asd gene deletion were unable to grow in the absence of supplemental DAP, demonstrating DAP auxotrophy.

TABLE 1
Primer Information

| Primer Name | Primer Sequence | SEQ ID NO. |
|---|---|---|
| asd-1 | ccttcctaacgcaaattccctg | 219 |
| asd-2 | ccaatgctctgcttaactcctg | 220 |
| asd-3 | gcctcgccatgtttcagtacg | 221 |
| asd-4 | ggtctggtgcattccgagtac | 222 |
| scFv-3 | cataatctgggtccttggtctgc | 223 |
| APR-001 | aaaaaagcttgcagctctggcccgtg | 226 |
| APR-002 | aaaaaagcttttagaaaaactcatcgagcatcaaatga | 227 |
| APR-003 | acactagaaggacagtatttggtatctg | 228 |
| APR-004 | agccgtagttaggccacc | 229 |
| flic-1 | cgttatcggcaatctggaggc | 232 |
| flic-2 | ccagcccttacaacagtggtc | 233 |
| flic-3 | gtctgtcaacaactggtctaacgg | 234 |
| flic-4 | agacggtcctcatccagataagg | 235 |
| fljb-1 | ttccagacgacaagagtatcgc | 236 |
| fljb-2 | cctttaggtttatccgaagccagaatc | 237 |
| fljb-3 | caccaggtttttcacgctgc | 238 |
| fljb-4 | acacgcatttacgcctgtcg | 239 |
| pagp-1 | gcgtgacggttctgagtgct | 315 |
| pagp-2 | cgtctttgctgccatcttccg | 316 |
| pagp-3 | acaataacgacgactccgataagg | 317 |
| pagp-4 | ctgctgaatgtgctgattaacctg | 318 |
| ansb-1 | accttagaagatagccgcaaagc | 319 |
| ansb-2 | cagagacatgacacccacgattatc | 320 |
| ansb-3 | gcaaaccgctatccagaacga | 321 |
| ansb-4 | agtttaagtatgccgtggtactgc | 322 |
| csgd-1 | cacttgctttaagatttgtaatggctag | 323 |
| csgd-2 | ggtgtattcgctttcccatttgtc | 324 |
| csgd-3 | tgtgctgtccaggttaatgcc | 325 |
| csgd-4 | gacgacggttttctcgaagtctc | 326 |

### Kanamycin Gene Cassette Removal

[1274] The kan selectable marker was removed by using the Cre/loxP site-specific recombination system. The YS1646Δasd gene Kan^{R} mutant was transformed with pJW168 (SEQ ID NO:224), a temperature-sensitive plasmid expressing the Cre recombinase. Amp^{R} colonies were selected at 30° C.; pJW168 was subsequently eliminated by growth at 42° C. A selected clone was tested for loss of kan by replica plating on LB agar plates with and without kanamycin, and confirmed by PCR verification using primers from the YS1646 genome flanking the sites of disruption (primers asd-3 and asd-4; for primer sequences, see Table 1).

Confirmation of Functional asd Deletion Mutant Strain YS1646Δasd (also designated AST-101)

[1275] The Δasd mutant was unable to grow on LB agar plates at 37° C., but was able to grow on LB plates containing 50 μg/mL diaminopimelic acid (DAP). The Δasd mutant growth rate was evaluated in LB liquid media; it was unable to grow in liquid LB, but was able to grow in LB supplemented with 50 μg/mL DAP, as determined by measuring absorbance at 600 nM.

### Sequence Confirmation of the asd Locus Sequence in Strain YS1646Δasd After asd Gene Deletion

[1276] The asd gene deletion strain was verified by DNA sequencing using primers asd-3 and asd-4 (see, Table 1). Sequencing of the region flanking the asd locus was performed, and the sequence confirmed that the asd gene was deleted from the YS1646 chromosome.

Complementation of asd Deletion by asd Expression from Plasmids

[1277] A plasmid, pATIU6 (SEQ ID NO:225), was chemically synthesized and assembled. The plasmid contained the following features: a high copy (pUC19) origin of replication, a U6 promoter for driving expression of a short hairpin, an ampicillin resistance gene flanked by HindIII restriction sites for subsequent removal, and the asd gene containing 85 base pairs of sequence upstream of the start codon (SEQ ID NO:246). Into this vector, shRNAs targeting murine TREX1 were introduced by restriction digestion with SpeI and XhoI, and ligation and cloning into E. coli DH5-alpha cells. The resulting plasmid was designated pATI-shTREX1.

Electroporation of Plasmids into Immunostimulatory Bacterial Strains

[1278] Selected plasmids, containing expression cassettes encoding immunostimulatory proteins and a functional asd gene, were electroporated into S. typhimurium strains lacking the asd gene with a BTX® ECM600 electroporator, using a 0.2 cm gap cuvette (BTX, San Diego, Calif.) at the following settings: 2.5 kV, 186 ohms, and 50 μF. Electroporated cells were added to 1 mL SOC supplemented with 50 μM diaminopimelic acid (DAP), incubated for 1 hour at 37° C., and then spread onto agar plates that do not contain DAP, to select for strains that received plasmids with a functional asd gene. After single colony isolation, cell banks were produced by inoculating a flask of sterile lysogeny broth (LB) with a single well isolated colony of S. typhimurium, and incubating at 37° C. with agitation at 250 RPM. After the culture was grown to stationary phase, the bacteria were washed in PBS containing 10% glycerol, and stored in aliquots frozen at less than −60° C.

[1279] The plasmid pATI-shTREX1 was amplified in E. coli and purified for transformation into the YS1646Δasd strain by electroporation and clonal selection on LB Amp plates, to produce strain YS1646Δasd-shTREX1. The YS1646Δasd mutants complemented with pATIU6-derived plasmids were able to grow on LB agar and liquid media in the absence of DAP.

[1280] In a subsequent iteration, the ampicillin resistance gene (Amp^{R}) from pATI-shTREX1 was replaced with a kanamycin resistance gene. This was accomplished by digestion of the pATI-shTREX1 plasmid with HindIII, followed by gel purification to remove the Amp^{R} gene. The kanamycin resistance (Kan^{R}) gene was amplified by PCR using primers APR-001 and APR-002 (SEQ ID NO:226 and SEQ ID NO:227, respectively), followed by digestion with HindIII, and ligation into the gel purified, digested pATIU6 plasmid.

[1281] In subsequent iterations, a single point mutation was introduced into the pATI-Kan plasmid at the pUC19 origin of replication, using the Q5® Site-Directed Mutagenesis Kit (New England Biolabs) and the primers APR-003 (SEQ ID NO:228) and APR-004 (SEQ ID NO:229), to change the nucleotide T at position 148 to a C. This mutation makes the origin of replication homologous to the pBR322 origin of replication, which is a low copy origin of replication, in order to reduce the plasmid copy number.

### Plasmid Maintenance Demonstrated In Vivo Using asd Complementation System

[1282] In this example, CT26 tumor-bearing mice were treated with strain YS1646 containing a plasmid that expresses an shRNA targeting TREX1 (YS1646-shTREX1), or with an asd-deleted strain of YS1646, containing a plasmid with a functional asd gene and an shRNA targeting TREX1 (YS1646Δasd-shTREX1).

[1283] CT26 (Colon Tumor #26) is a tumor model that originated from exposing BALB/c mice to N-nitro-N-methylurethane (NMU), resulting in a highly metastatic carcinoma that recapitulates the aggressive, undifferentiated and checkpoint-refractory human colorectal carcinoma (see, e.g., Castle et al. (2014) BMC Genomics 15(1):190). When implanted subcutaneously in the flank, as opposed to orthotopically in the colon, the tumor immunophenotype is much more immunosuppressive and checkpoint refractory. While largely lacking in T-cell infiltration, the tumor is rich in myeloid cells, such as macrophages and myeloid-derived suppressor cells (MDSCs) (see, e.g., Zhao et al. (2017) Oncotarget 8(33):54775-54787). As this model more closely resembles human microsatellite stable (MSS) colorectal cancer, it is an ideal model to evaluate the therapeutic approach provided herein.

[1284] For this experiment, 6-8 week-old female BALB/c mice (3 mice per group) were inoculated subcutaneously (SC) in the right flank with CT26 (purchased from ATCC) tumor cells (2×10⁵ cells in 100 μL PBS). Mice bearing 8 day-old established flank tumors were intravenously (IV) injected with three doses of 5×10⁶ CFUs of the YS1646Δasd-shTREX1 strain, or the parental YS1646-shTREX1 strain, on days 8, 15, and 23. The plasmid encodes shTREX1 as an exemplary therapeutic product; any other desired therapeutic product or products can be substituted.

[1285] Body weights and tumors were measured twice weekly. Tumor measurements were performed using electronic calipers (Fowler, Newton, MA). Tumor volume was calculated using the modified ellipsoid formula, 1/2(length×width²). Mice were euthanized when tumor size reached >20% of body weight or became necrotic, as per IACUC regulations.

[1286] At 12 days after the final Salmonella injection, tumors were homogenized, and homogenates were serially diluted and plated on LB agar plates, to enumerate the total number of colony forming units (CFUs) present, or on LB plates containing kanamycin, to enumerate the number of kanamycin resistant colonies.

[1287] The results demonstrated that S. typhimurium strain YS1646-shTREX1 did not have selective pressure to maintain the shRNA plasmid, and demonstrated significant plasmid loss, as the percent of kanamycin resistant (Kan^{R}) colonies was less than 10%. The strain that used the asd gene complementation system for plasmid maintenance, YS1646Δasd-shTREX1, had nearly identical numbers of kanamycin resistant and kanamycin sensitive CFUs. These data demonstrate that the asd gene complementation system is sufficient to maintain the plasmid in the context of the tumor microenvironment in mice.

### Enhanced Anti-Tumor Efficacy Using asd Complementation System

[1288] The asd complementation system is designed to prevent plasmid loss and potentiate the anti-tumor efficacy of the therapeutic product delivery by S. typhimurium strains in vivo. To test this, YS1646Δasd strains containing the shTREX1 plasmid (YS1646Δasd-shTREX1), or scrambled control (YS1646Δasd-shSCR), that contain a functional asd gene cassette, were compared for anti-tumor efficacy in a murine colon carcinoma model, to strain YS1646 containing plasmid pEQU6-shTREX1 (YS1646-shTREX1), a plasmid that lacks an asd gene cassette, and therefore, does not have a mechanism for plasmid maintenance. shTREX1 is an exemplary therapeutic product.

[1289] For this experiment, 6-8 week-old female BALB/c mice (8 mice per group) were inoculated SC in the right flank with CT26 cells (2×10⁵ cells in 100 μL PBS). Mice bearing established flank tumors were IV injected twice, on day 8 and on day 18, with 5×10⁶ CFUs of YS1646Δasd-shTREX1, or YS1646-shTREX1, and compared to PBS control.

[1290] The YS1646-shTREX1 strain demonstrated enhanced tumor control compared to PBS (70% tumor growth inhibition (TGI), day 28) despite its demonstrated plasmid loss over time. The Δasd strain containing the plasmid with the asd gene complementation system and shTREX1 (YS1646Δasd-shTREX1) demonstrated superior tumor growth inhibition compared to PBS (82% TGI, p=0.002, day 25). These data demonstrate that improved potency is achieved by preventing plasmid loss, using the asd complementation system, and delivery of shTREX1, as compared to YS1646 containing plasmids without the asd gene complementation system. Thus, strains with asd complementation systems are superior anti-cancer therapeutics.

### Example 4

### S. typhimurium Flagellin Knockout by Deletion of the fliC and fljB Genes Strain Engineering and Characterization

[1291] In the example herein, the live attenuated S. typhimurium YS1646 strain containing the asd gene deletion was further engineered to delete the fliC and fljB genes, in order to remove both flagellin subunits. This eliminates pro-inflammatory TLR5 activation, in order to reduce pro-inflammatory signaling and improve anti-tumor adaptive immunity.

Deletion of fliC Gene

[1292] In this example, fliC was deleted from the chromosome of the YS1646Δasd strain using modifications of the method of Datsenko and Wanner (Proc. Natl. Acad. Sci. U.S.A. 97:6640-6645 (2000)) as described in detail in the previous example. Briefly, synthetic fliC gene homology arm sequences, that contained 224 and 245 bases of homologous sequence flanking the fliC gene, were cloned into a plasmid called pSL0147 (SEQ ID NO:230). A kanamycin gene cassette flanked by cre/loxP sites then was cloned into plasmid pSL0147, and the fliC gene knockout cassette was then PCR amplified with primers flic-1 (SEQ ID NO:232) and flic-2 (SEQ ID NO:233), gel purified, and then introduced into the YS1646Δasd strain carrying the temperature sensitive lambda red recombination plasmid pKD46, by electroporation. Electroporated cells were recovered in SOC+DAP medium, and plated onto LB agar plates supplemented with kanamycin (20 μg/mL) and diaminopimelic acid (DAP, 50 μg/mL). Colonies were selected and screened for insertion of the knockout fragment by PCR using primers flic-3 (SEQ ID NO:234) and flic-4 (SEQ ID NO:235). pKD46 then was cured by culturing the selected kanamycin resistant strain at 42° C. and screening for loss of ampicillin resistance. The kanamycin resistance marker then was cured by electroporation of a temperature-sensitive plasmid expressing the Cre recombinase (pJW168), and Amp^{R} colonies were selected at 30° C.; pJW168 was subsequently eliminated by growing cultures at 42° C. Selected fliC knockout clones were then tested for loss of the kanamycin marker by PCR, using primers flanking the sites of disruption (flic-3 and flic-4), and evaluation of the electrophoretic mobility on agarose gels.

Deletion of fljB Gene

[1293] The fljB gene was then deleted from the YS1646Δasd/ΔfliC strain using modifications of the methods described above. Synthetic fljB gene homology arm sequences that contained 249 and 213 bases of the left hand and right hand sequence, respectively, flanking the fljB gene, were synthesized and cloned into a plasmid called pSL0148 (SEQ ID NO:231). A kanamycin gene cassette flanked by cre/loxP sites then was cloned into pSL0148, and the fljB gene knockout cassette was PCR amplified with primers fljb-1 (SEQ ID NO:236) and fljb-2 (SEQ ID NO:237) (see, Table 1), gel purified, and introduced into strain YS1646Δasd/ΔfliC carrying the temperature sensitive lambda red recombination plasmid pKD46, by electroporation. The kanamycin resistance gene then was cured by Cre-mediated recombination, as described above, and the temperature-sensitive plasmids were cured by growth at non-permissive temperature. The fliC and fljB gene knockout sequences were amplified by PCR using primers flic-3 and flic-4, or fljb-3 (SEQ ID NO:238) and fljb-4 (SEQ ID NO:239), respectively, and verified by DNA sequencing. This mutant derivative of strain YS1646 was designated YS1646Δasd/ΔfliC/ΔfljB, or YS1646Δasd/ΔFLG for short.

In Vitro Characterization of Engineered S. typhimurium Flagellin Knockout Strain

[1294] The YS1646-derived asd⁻ mutant strain harboring the deletions of both fliC and fljB, herein referred to as YS1646Δasd/ΔFLG, was evaluated for swimming motility by spotting 10 microliters of overnight cultures onto swimming plates (LB containing 0.3% agar and 50 mg/mL DAP). While motility was observed for the YS1646Δasd strain, no motility was evident with the YS1646Δasd/ΔFLG strain. The YS1646Δasd/ΔFLG strain then was electroporated with a plasmid containing an asd gene, and its growth rate in the absence of DAP was assessed. The YS1646Δasd/ΔFLG strain, with an asd complemented plasmid was able to replicate in LB in the absence of supplemental DAP, and grew at a rate comparable to the YS1646Δasd strain containing an asd complemented plasmid. These data demonstrate that the elimination of flagellin does not decrease the fitness of S. typhimurium in vitro.

### Elimination of Flagella Decreases Pyroptosis in Murine Macrophages

[1295] 5×10³ mouse RAW macrophage cells (InvivoGen, San Diego, Ca.) were infected with the YS1646Δasd/ΔFLG strain, or the parental YS1646Δasd strain, both harboring an asd complemented plasmid, at an MOI of approximately 100 in a gentamicin protection assay. After 24 hours of infection, culture supernatants were collected and assessed for lactate dehydrogenase release as a marker of macrophage cell death, using a Pierce™ LDH Cytotoxicity Assay Kit (Thermo Fisher Scientific, Waltham, Ma.). The YS1646Δasd strain induced 75% maximal LDH release, while the YS1646Δasd/ΔFLG strain induced 54% maximal LDH release, demonstrating that deletion of the flagellin genes reduces the S. typhimurium-induced pyroptosis of infected macrophages.

[1296] Flagella-Deleted Mutants Lead to Less Pyroptosis in Infected Human Monocytes To demonstrate that the YS1646Δasd/ΔFLG strains are reduced in their ability to cause cell death in macrophages, THP-1 human macrophage cells (ATCC Catalog #202165) were infected with the S. typhimurium strains YS1646 and YS1646Δasd/ΔFLG, with the Δasd strain containing plasmids encoding a functional asd gene to ensure plasmid maintenance. 5×10⁴ cells were placed in a 96-well dish with DMEM and 10% FBS. Cells were infected with washed log-phase cultures of S. typhimurium for 1 hour at an MOI of 100 CFUs per cell, then the cells were washed with PBS, and the media was replaced with media containing 50 μg/mL gentamicin to kill extracellular bacteria, and 50 ng/mL of IFNγ to convert the monocytes into a macrophage phenotype. After 24 hours, the THP-1 cells were stained with CellTiter-Glo® reagent (Promega), and the percentage of viable cells was determined using a luminescent cell viability assay using a SpectraMax® MR plate reader (Molecular Devices) to quantify the luminescence. The cells infected with the YS1646 strain had only 38% viability, while the cells infected with the YS1646Δasd/ΔFLG strain had 51% viability, indicating that the deletion of the flagellin genes induced less cell death of human macrophages, despite a very high and supraphysiological MOI.

### Flagella is not Required for Tumor Colonization After Systemic Administration

[1297] To assess the impact of the flagellin knockout strains, administered in a murine model of colon carcinoma, 6-8 week-old female BALB/c mice (5 mice per group) were inoculated SC in the right flank with CT26 cells (2×10⁵ cells in 100 μL PBS). Mice bearing 10-day established flank tumors were IV injected with a single dose of 3×10⁵ CFUs of the YS1646Δasd/ΔFLG-shTREX1 strain, or the parental YS1646Δasd-shTREX1 strain. At day 35 post tumor implantation, mice were euthanized, and tumors were homogenized and plated on LB plates to enumerate the number of colony forming units (CFUs) per gram of tumor tissue. The YS1646Δasd-shTREX1 strain colonized tumors at a mean of 5.9×10⁷ CFUs per gram of tumor tissue, while the flagella-deleted YS1646Δasd/ΔFLG-shTREX1 strain colonized the tumors with almost a 2-fold increased mean of 1.1×10⁸ CFUs/g of tumor tissue. The splenic colonization of the YS1646Δasd-shTREX1 strain was calculated as a mean of 1.5×10³ CFUs/g of spleen tissue, whereas splenic colonization of the flagella-deleted YS1646Δasd/ΔFLG-shTREX1 strain was slightly lower, at a mean of 1.2×10³ CFUs/g of spleen tissue.

[1298] These data demonstrate that the absence of flagella not only does not negatively impact tumor colonization after IV administration, but it enhances tumor colonization compared to the flagella-intact strain. Importantly, deletion of the flagella slightly reduces splenic colonization, giving a tumor to spleen ratio of 100,000-fold. These data demonstrate that, contrary to the expectation from the art, not only are the flagella not required for tumor colonization, but their elimination enhances tumor colonization, while reducing splenic colonization.

### The Flagella-Deleted Strain Demonstrates Enhanced Anti-Tumor Activity in Mice

[1299] To assess the impact of the flagellin knockout strains, administered in a murine model of colon carcinoma, 6-8 week-old female BALB/c mice (5 mice per group) were inoculated SC in the right flank with CT26 cells (2×10⁵ cells in 100 μL PBS). Mice bearing established flank tumors were IV injected with a single dose of 3×10⁵ CFUs of the YS1646Δasd/ΔFLG-shTREX1 strain, or the YS1646Δasd-shTREX1 strain, and compared to PBS control. Mice were monitored by caliper measurements for tumor growth.

[1300] The results demonstrated that the YS1646Δasd/ΔFLG-shTREX1 strain, incapable of making flagella, showed enhanced tumor control compared to the parental YS1646Δasd-shTREX1 strain (27% TGI, day 24), and significant tumor control compared to the PBS control (73% TGI, p=0.04, day 24). These data demonstrate that, not only is the flagella not required for tumor colonization, but its loss can enhance anti-tumor efficacy.

### Flagella-Deleted Strains Demonstrate Enhanced Adaptive Immunity in a Murine Tumor Model

[1301] The impact of deletion of the flagellin on the immune response, and whether STING activation from tumor myeloid cell-delivery of shRNA to the STING checkpoint gene TREX1 would promote an adaptive type I IFN immune signature, was assessed. The CT26 murine model of colon carcinoma was used, where 6-8 week-old female BALB/c mice (5 mice per group) were inoculated SC in the right flank with CT26 cells (2×10⁵ cells in 100 μL PBS). Mice bearing established flank tumors were IV injected 11 days post tumor implantation with 5×10⁶ CFUs of the YS1646Δasd/ΔFLG-shTREX1 strain, or the parental YS1646Δasd-shTREX1, or the scrambled plasmid control strain, YS1646Δasd-shSCR, and compared to PBS control.

[1302] Mice were bled 7 days post-dosing on Sodium Heparin coated tubes (Becton Dickinson). Non-coagulated blood was then diluted in the same volume of PBS and peripheral blood mononuclear cells (PBMCs) were separated from the interphase layer of whole blood using Lympholyte®-M cell separation reagent (Cedarlane). Isolated PBMCs were washed with PBS+2% FBS by centrifugation at 1300 RPM for 3 minutes at room temperature, and resuspended in flow buffer. One million PBMCs were seeded per well of a V-bottom 96-well plate. Cells were centrifuged at 1300 RPM for 3 minutes at room temperature (RT) and resuspended in 100 μL of flow buffer containing fluorochrome-conjugated AH1 peptide:MHC class I tetramers (MBL International), and the cell surface flow cytometry antibodies CD4 FITC clone RM4-5; CD8a BV421 clone 53-6.7; F4/80 APC clone BM8; CD11b PE-Cy7 clone M1/70; CD45 BV570 clone 30-F11; CD3 PE clone 145-2C11; Ly6C BV785 clone HK1.4; I-A/I-E APC-Cy7 clone M5/114.15.2; Ly6G BV605 clone 1A8; and CD24 PercP-Cy5.5 clone M1/69 (all from BioLegend), for 45 minutes at room temperature and in the dark. After 45 minutes, the cells were washed twice with PBS+2% FBS by centrifugation at 1200 RPM for 3 minutes. The cells were then resuspended in PBS+2% FBS containing DAPI (4′,6-diamino-2-phenylindole; dead/live stain), and data were immediately acquired using the NovoCyte® flow cytometer (ACEA Biosciences, Inc.) and analyzed using FlowJo™ software (Tree Star, Inc.).

[1303] The following cell types were enumerated as a percentage of total live cells: CD11b⁺ Gr1⁺ neutrophils (possibly MDSCs, although further phenotyping in an ex vivo functional assay would be required), CD11b⁺ F4/80⁺ macrophages, CD8⁺ T-cells, and CD8⁺ T-cells that recognize the CT26 tumor rejection antigen gp70 (AH1), the product of the envelope gene of murine leukemia virus (MuLV)-related cell surface antigen (see, e.g., Castle et al. (2014) BMC Genomics 15(1):190).

[1304] The results, summarized in the table below, show that the YS1646Δasd-shSCR strain, containing a plasmid encoding a non-specific scrambled shRNA, elicits the typical anti-bacterial immune profile of significantly increased neutrophils, as compared to PBS (p=0.02), to the flagella-intact YS1646Δasd-shTREX1 strain (p=0.02), and to the flagella-deleted strain YS1646Δasd/ΔFLG-shTREX1 (p=0.01), which had the lowest levels of circulating neutrophils. Similarly, bacterially-induced macrophages also were significantly elevated in the YS1646Δasd-shSCR strain, as compared to PBS (p=0.01), to the YS1646Δasd-shTREX1 strain (p=0.01), and to YS1646Δasd/ΔFLG-shTREX1 strain (p=0.01). Thus, both strains carrying type I IFN-inducing payloads were capable of overwriting the normal anti-bacterial immune response, which clears bacterial infections through neutrophils and macrophages, and does not induce adaptive T-cell-mediate immunity. However, while the overall circulating levels of CD8⁺ T-cells were similar across all groups, the flagella-deleted YS1646Δasd/ΔFLG-shTREX1 strain demonstrated significantly increased percentages of AH1-tetramer⁺ CD8⁺ T-cells, as compared to PBS (p=0.04).

[1305] These data demonstrate the feasibility of engineering a bacteria to deliver viral-like type I IFN-inducing plasmids to tumor-resident myeloid cells. This results in a dramatic reprogramming of the immune response towards a more viral, and less bacterial, immune profile. Deletion of the flagella further enhanced the shift away from bacterially-recruited neutrophils and macrophages, and towards significantly increased tumor antigen-specific CD8⁺ T-cells. Thus, eliminating bacterial TLR5-mediated inflammation can enhance adaptive immunity.

| | % Live Cells Mean ± SD | | | |
|---|---|---|---|---|
| | | | | YS1646Δasd/ |
| | | YS1646Δasd- | YS1646Δasd- | ΔFLG- |
| Immune Cells | PBS | shSCR | shTREX1 | shTREX1 |
| Neutrophils | 6.27 ± 2.62 | 19.21 ± 9.46 | 5.87 ± 3.94 | 4.01 ± 1.65 |
| Macrophages | 10.08 ± 2.11 | 23.14 ± 9.04 | 9.12 ± 3.84 | 7.39 ± 2.11 |
| CD8⁺ T-Cells | 6.64 ± 0.56 | 7.17 ± 0.60 | 7.14 ± 2.30 | 6.44 ± 1.43 |
| AH1⁺ CD8⁺ | 0.83 ± 0.12 | 1.06 ± 1.11 | 2.27 ± 1.44 | 4.12 ± 3.08 |
| T-Cells | | | | |

SD = Standard deviation

### Flagella-Deleted Strains are Restricted to the Phagocytic Myeloid Immune Cell Compartment In Vivo

[1306] According to the literature, ΔfljB/ΔfljC strains demonstrate suppression of many downstream genes associated with SPI-1-mediated entry into non-phagocytic cells. In order to determine whether the YS1646Δasd/ΔFLG strain also is deficient for non-phagocytic cell uptake, a YS1646Δasd/ΔFLG strain, constitutively expressing mCherry (a red fluorescent protein) under the bacterial rpsM promoter, was IV administered to MC38 subcutaneous flank tumor-bearing mice.

[1307] The MC38 (murine colon adenocarcinoma #38) model was derived similarly as the CT26 model using mutagenesis, but with dimethylhydralazine, and in a C57BL/6 mouse strain (see, e.g., Corbett et al. (1975) Cancer Res. 35(9):2434-2439). Similarly to CT26, subcutaneous implantation results in a more T-cell excluded and immunosuppressive tumor microenvironment than when implanted orthotopically in the colon (see, e.g., Zhao et al. (2017) Oncotarget 8(33):54775-54787). MC38 has a higher mutational burden than CT26, and a similar viral-derived gp70 antigen (p15E) that can be detected by CD8⁺ T-cells, although it is not considered a rejection antigen. While variants of MC38 have been found to be partially responsive to checkpoint therapy, most variants of the cell line are considered checkpoint refractory and T-cell excluded (see, e.g., Mariathasan et al. (2018) Nature 555:544-548), including the MC38 cells used herein.

[1308] For this experiment, 6-8 week-old female C57BL/6 mice (5 mice per group) were inoculated SC in the right flank with MC38 cells (5×10⁵ cells in 100 μL PBS). Mice bearing large established flank tumors were IV injected on day 34 with 1×10⁶ CFUs of the YS1646Δasd/ΔFLG-mCherry strain. Tumors were resected 7 days post-IV dosing, and cut into 2-3 mm pieces into gentleMACS™ C tubes (Miltenyi Biotec) filled with 2.5 mL enzyme mix (RPMI-1640 containing 10% FBS with 1 mg/mL Collagenase IV and 20 μg/mL DNase I). The tumor pieces were dissociated using OctoMACS™ (Miltenyi Biotec) specific dissociation program (mouse implanted tumors), and the whole cell preparation was incubated with agitation for 45 minutes at 37° C. After the 45 minute incubation, a second round of dissociation was performed using the OctoMACS™ (mouse implanted tumor) program, and the resulting single cell suspensions were filtered through a 70 μM nylon mesh into a 50 mL tube. The nylon mesh was washed once with 5 mL of RPMI-1640+10% FBS, and the cells were filtered a second time using a new 70 μM nylon mesh into a new 50 mL tube. The nylon mesh was washed with 5 mL of RPMI-1640+10% FBS, and the filtered cells were then centrifuged at 1000 RPM for 7 minutes. The resulting dissociated cells were resuspended in PBS and kept on ice before the staining process.

[1309] For the flow-cytometry staining, 100 μL of the single cell suspensions were seeded in wells of a V-bottom 96-well plate. PBS containing a dead/live stain (Zombie Aqua™, BioLegend), and Fc Blocking reagents (BD Biosciences), were added at 100 μL per well and the cells were incubated on ice for 30 minutes in the dark. After 30 minutes, the cells were washed twice with PBS+2% FBS by centrifugation at 1300 RPM for 3 minutes. Cells were then resuspended in PBS+2% FBS containing fluorochrome-conjugated antibodies (CD4 FITC clone RM4-5; CD8a BV421 clone 53-6.7; F4/80 APC clone BM8; CD11b PE-Cy7 clone M1/70; CD45 BV570 clone 30-F11; CD3 PE clone 145-2C11; Ly6C BV785 clone HK1.4; I-A/I-E APC-Cy7 clone M5/114.15.2; Ly6G BV605 clone 1A8; and CD24 PercP-Cy5.5 clone M1/69, all from BioLegend), and incubated on ice for 30 minutes in the dark. After 30 minutes, the cells were washed twice with PBS+2% FBS by centrifugation at 1300 RPM for 3 minutes and resuspended in flow cytometry fixation buffer (Thermo Fisher Scientific). Flow cytometry data were acquired using the NovoCyte® Flow Cytometer (ACEA Biosciences, Inc.), and analyzed using the FlowJo™ software (Tree Star, Inc.).

[1310] The results demonstrated that 7.27% of tumor-infiltrating monocytes had taken up the flagella-deleted mCherry strain in the tumor microenvironment. Similarly, 8.96% of the tumor-associated macrophage (TAM) population, and 3.33% of the tumor-infiltrating dendritic cells (DCs) had taken up the flagella-deleted mCherry strain. In contrast, within the CD45⁻ population, corresponding to stromal and tumor cells, only 0.076% showed positivity for mCherry expression (compared to 0.067% background staining). These data demonstrate that the flagella and its downstream signaling impact on SPI-1, are necessary to enable epithelial cell infectivity, and that the lack thereof restricts uptake of the bacteria to only the phagocytic immune cell compartment of the tumor microenvironment (i.e., tumor-resident immune/myeloid cells).

[1311] Deletion of the flagella confers multiple benefits to the immunostimulatory S. typhimurium strain, including eliminating TLR5-induced inflammatory cytokines that suppress adaptive immunity, reducing macrophage pyroptosis, as well as maintaining (or enhancing) tumor-specific enrichment upon systemic administration, where uptake is confined to tumor-resident phagocytic cells.

### Example 5

### Salmonella pagP Gene Knockout Strain Engineering and Characterization

[1312] In this example, the YS1646Δasd/ΔFLG strain was further modified to delete pagP. The pagP gene is induced during the infectious life cycle of S. typhimurium, and encodes an enzyme (lipid A palmitoyltransferase) that modifies lipid A with palmitate. In wild-type S. typhimurium, expression of pagP results in a lipid A molecule that is hepta-acylated. In an msbB⁻ mutant, in which the terminal acyl chain of lipid A cannot be added, the expression of pagP results in a hexa-acylated lipid A molecule. LPS with hexa-acylated lipid A has been shown to be highly pro-inflammatory, and to have a high affinity for TLR4 (hepta-acylated lipid A, found in wild-type, has the highest affinity for TLR4). In this example, a strain deleted of pagP and msbB can produce only penta-acylated lipid A, allowing for lower pro-inflammatory cytokines due to low affinity for TLR4, enhanced tolerability, and increased adaptive immunity when the bacteria are engineered to deliver plasmids encoding immunomodulatory proteins.

ΔpagP Strain Construction

[1313] The pagP gene was deleted from the YS1646Δasd/ΔFLG strain using modifications of the methods described in the preceding examples. Synthetic pagP gene homology arm sequences that contain 203 and 279 bases of the left hand and right hand sequence, respectively, flanking the pagP gene, were synthesized and cloned into a plasmid called pSL0191 (SEQ ID NO:331). A kanamycin gene cassette flanked by cre/loxP sites then was cloned into pSL0191, and the pagP gene knockout cassette was PCR amplified with primers pagp-1 (SEQ ID NO:315) and pagp-2 (SEQ ID NO:316) (see, Table 1), gel purified, and introduced into strain YS1646Δasd/ΔFLG, carrying the temperature sensitive lambda red recombination plasmid pKD46, by electroporation. The kanamycin resistance gene then was cured by Cre-mediated recombination, as described above, and the temperature-sensitive plasmids were cured by growth at non-permissive temperature. The pagP gene knockout sequences were amplified by PCR using primers pagp-3 (SEQ ID NO:317) and pagp-4 (SEQ ID NO:318), and verified by DNA sequencing. The resulting mutant derivative of YS1646 was designated YS1646Δasd/ΔFLG/ΔpagP.

pagP Deletion Mutants have LPS with Penta-Acylated Lipid A, and Induce Reduced Inflammatory Cytokines

[1314] The pagP gene also was deleted from the YS1646Δasd strain using the lambda-derived Red recombination system, as described in Datsenko and Wanner (Proc. Natl. Acad. Sci. U.S.A. 97:6640-6645 (2000)) and above, to generate the strain YS1646Δasd/ΔpagP. This strain was then electroporated with a plasmid containing a functional asd gene, to complement the deleted asd gene and to ensure plasmid maintenance in vivo. The lipid A was then extracted from this strain and evaluated by Matrix-Assisted Laser Desorption/Ionization Mass Spectrometry (MALDI MS) and compared to lipid A from the wild-type S. typhimurium strain ATCC 14028, the YS1646 strain (which is deleted for msbB and purI), and the YS1646Δasd strain. Wild-type Salmonella had a minor lipid A peak with a mass of 2034, and a major peak with a mass of 1796, corresponding to the hepta-acylated and hexa-acylated species, respectively, due to the presence of a functional msbB gene. The msbB-deleted strains, YS1646 and YS1646Δasd, had major peaks at 1828 and 1585, corresponding to a mixture of hexa-acylated and penta-acylated lipid A. The msbB and pagP deleted strain, YS1646Δasd/ΔpagP, had only a single peak with a mass of 1585, corresponding to penta-acylated lipid A. These data demonstrate that deletion of pagP prevents palmitoylation of the lipid A, thereby restricting it to a single penta-acylated species.

[1315] To determine whether the LPS with penta-acylated lipid A from the ΔpagP mutant strains reduced TLR4 signaling, 4 μg of purified LPS from the wild-type strain, the YS1646 strain, or the YS1646Δasd/ΔpagP strain, was added to THP-1 human monocytic cells (ATCC Catalog #TIB-202), and the supernatants were evaluated 24 hours later for the presence of inflammatory cytokines using a Cytometric Bead Array (CBA) kit (BD Biosciences). The results showed that LPS from the YS1646Δasd/ΔpagP strain induced 25% of the amount of TNFα, compared to wild-type LPS, and induced 7-fold less IL-6 than wild-type LPS. The LPS from the YS1646Δasd/ΔpagP strain induced 22-fold less IL-6 than strain YS1646, demonstrating that the penta-acylated LPS species from a ΔpagP mutant is significantly less inflammatory in human cells, and indicating that the ΔpagP mutant would be better tolerated in humans.

Deletion of pagP Induces Significantly Less IL-6 in Primary Human M2 Macrophages

[1316] To demonstrate that the YS1646Δasd/ΔFLG/ΔpagP strain also elicits less inflammatory and dose-limiting IL-6 from primary human M2 macrophages, the strain was evaluated, and compared with the YS1646Δasd/ΔFLG and the parental YS1646 strains. The M2 macrophages derived from human donors are representative of the immunosuppressive phenotypes that are highly enriched in T-cell excluded solid tumors. Frozen human PBMCs, isolated from healthy human donors, were thawed in complete medium (RPMI-1640+1× non-essential amino acids+5% human AB serum), and washed by centrifugation for 10 minutes at 800 RPM at room temperature. PBMCs were resuspended in PBS+2% FBS, and monocytes were negatively isolated using a CD16 depletion kit (StemCell Technologies). Isolated untouched monocytes were then washed by centrifugation in PBS+2% FBS and resuspended in complete medium containing 100 ng/mL human macrophage colony-stimulating factor (M-CSF) and 10 ng/mL human IL-4. Isolated monocytes (3e5 per well) were then seeded in a 24-well plate with a final volume of 750 μL. Two days after seeding, the cell culture media was entirely aspirated and replaced with fresh complete medium containing 100 ng/mL human M-CSF and 10 ng/mL human IL-4. Two days later (on day 4), 500 μL of complete medium, containing cytokines100 ng/mL human M-CSF and 10 ng/mL human IL-4, was added per well for 48 hours. On day 6, the cell culture media was entirely aspirated and replaced with fresh complete medium without cytokines, alone, or with media containing the log-phase cultures of the S. typhimurium strains at an MOI of 20. Cells were infected for 1 hour, then washed with PBS, and the media was replaced with fresh media containing 50 μg/mL gentamicin to kill extracellular bacteria. The wells were then washed and replaced with fresh media and allowed to incubate at 37° C. and 5% CO₂. After 48 hours, supernatants were harvested and assayed for cytokines using a human IL-6 cytometric bead array (CBA) kit (BD Biosciences), according to the manufacturer's instructions.

[1317] The results demonstrated that secreted IL-6 levels from human primary M2 macrophages, infected with parental strain YS1646, yielded an average of 14839 f 926 pg/mL, while the IL-6 levels from the YS1646Δasd/ΔFLG strain were significantly lower, at 2075±723 pg/mL (p=0.004). This further affirms the impact that the deletion of flagella, and elimination of TLR5 signaling, has on the induction of IL-6. The YS1646Δasd/ΔFLG/ΔpagP strain elicited the lowest IL-6 levels, at 332±100 pg/mL, demonstrating the reduced ability of this modified LPS coating to stimulate TLR4, and the resulting dramatically reduced inflammatory IL-6 production.

The Combined Flagella and pagP Deletions Significantly Enhance Tolerability in Mice

[1318] To determine whether the modified strains described above are more attenuated than parental strain YS1646, a median lethal dose (LD₅₀) study was conducted. 6-8 week-old BALB/c mice (5 mice per group) were injected intravenously with a dose range of 3e5 to 3e7 CFUs of strain YS1646, or the derivative strains YS1646Δasd/ΔFLG, YS1646Δasd/ΔpagP, and YS1646Δasd/ΔFLG/ΔpagP. Unlike strain YS1646, the derivative strains also carried a plasmid encoding murine IL-2, an FDA-approved cytokine that has demonstrated significant toxicity when systemically administered.

[1319] The LD₅₀ for strain YS1646 was found to be 4.4×10⁶ CFUs (average of two studies), in line with previously published LD₅₀ reports of YS1646, and a >1000-fold improvement compared to wild-type S. typhimurium (see, e.g., Clairmont et al. (2000) J. Infect. Dis. 181:1996-2002). The LD₅₀ for the YS1646Δasd/ΔFLG strain was determined to be 2.07×10⁷ CFUs, demonstrating a greater than 4.5-fold reduction in virulence compared to strain YS1646. The LD₅₀ for the YS1646Δasd/ΔpagP strain was determined to be 1.39×10⁶ CFUs, demonstrating at least a 3.2-fold reduction in virulence compared to strain YS1646, which is expected, given that the strain still has highly inflammatory flagella. The LD₅₀ for the YS1646Δasd/ΔFLG/ΔpagP strain could not be established, as no mice died at the highest dose given, but was >6.2×10⁷ CFUs. The YS1646Δasd/ΔFLG/ΔpagP strain therefore demonstrates a >14-fold reduction in virulence compared to parental YS1646 strain. These data demonstrate that the genetic modifications described above reduce the virulence of the clinical S. typhimurium strain, YS1646 (also known as VNP20009), and therefore, lead to increased tolerability in humans.

[1320] In the Phase I clinical trial of VNP20009 (see, e.g., Toso et al. (2002) J. Clin. Oncol. 20(1):142-152), the presence of the bacteria in patients' tumors only partially was observed at the two highest doses tested, 3×10⁸ CFU/m² (33% presence), and 1±10⁹ CFU/m² (50% presence), indicating that the tolerable dose of VNP20009 was too low to achieve tumor colonization. By improving the tolerability of the strains through the modifications described above, >14-fold higher doses can be administered, if necessary, improving the percentage of patients whose tumors will be colonized, and increasing the level of therapeutic colonization per tumor, thereby solving the observed problems with VNP20009.

The Combined Flagella and pagP Deletions Significantly Limit the Generation of Anti-S. typhimurium Antibodies in Mice

[1321] The surviving mice from the 3×10⁶ CFU dosing group described above (N=5, except for N=4 in the YS1646 dosing group) were kept for 40 days post IV dosing, at which time they were bled for serum, and assessed for antibody titers to S. typhimurium, by a modified flow-based antibody titering system. Overnight cultures of the YS1646Δasd/ΔFLG-mCherry strain were washed and fixed with flow cytometry fixation buffer. Sera from the previously-treated mice, and from naïve control mice, were seeded in a 96-well plate, and serial dilutions were performed in PBS. Next, 25 μL of the YS1646Δasd/ΔFLG-mCherry cultures, containing 1×10⁶ CFUs, were added to the sera and incubated for 25 minutes at room temperature (RT). The bacteria were then washed twice with PBS by spinning them at 4000 RPM for 5 minutes. After the last wash, the bacteria were resuspended in PBS containing a secondary Goat anti-Mouse Fc AF488 antibody (1/400 dilution from stock), and incubated for 25 minutes at room temperature and protected from light. The bacteria were then washed three times with PBS by spinning them at 4000 RPM for 5 minutes. After the last wash, the bacteria were resuspended in PBS and data were acquired using the NovoCyte® flow cytometer (ACEA Biosciences, Inc.), and analyzed using the MFI FlowJo™ software (Tree Star, Inc.).

[1322] To evaluate the results by flow cytometry, the highest dilution with signal in all groups was chosen (the 1250× serum dilution), and the corresponding mean fluorescence intensity (MFI) values were plotted. The limit of detection (LOD) was chosen at an MFI of 1000, as that is the MFI obtained without staining, as well as with background staining with Goat anti-Mouse Fc AF488 antibody only. Therefore, an MFI greater than 1000 was considered a positive signal, and everything equal to or under this value was considered a negative result, despite having an MFI value.

[1323] The results of this assay revealed a high MFI titer of anti-S. typhimurium serum antibodies from mice treated with 3×10⁶ CFUs of the YS1646 strain (MFI of 29196.3±20730), in line with previously published data that YS1646 is able to generate serum antibodies (that are non-neutralizing). Fewer antibodies were detected in the mice treated with the YS1646Δasd/ΔFLG strain (MFI of 11257±9290), which can be due to the lack of adjuvant activity from the flagella. In the mice treated with the YS1646Δasd/ΔpagP strain, significantly fewer antibodies were generated (MFI of 4494±3861), as compared to strain YS1646 (p=0.033), which can be due to the altered LPS surface coating. The most significant reduction in serum antibodies was demonstrated in the YS1646Δasd/ΔFLG/ΔpagP treatment group (MFI of 1930±2445), where several of the mice had MFI titers under 1000, and were thus considered negative for serum antibodies (p=0.021, vs. strain YS1646). Thus, the combined deletions of the flagella and the pagP gene enable both improved safety, as well as significantly reduced immunogenicity, which will enable repeat dosing of high CFUs in humans.

pagP and Flagella Deleted Strains, and their Combination, Demonstrate Significantly Higher Viability in Human Serum Compared to Strain YS1646

[1324] Strain YS1646 exhibits limited tumor colonization in humans after systemic administration. It is shown herein that strain YS1646 is inactivated by complement factors in human blood. To demonstrate this, strains YS1646 and E. coli D10B were compared to exemplary immunostimulatory bacteria provided herein, that contain additional mutations that alter the surface of the bacteria. These exemplary modified strains were YS1646Δasd/ΔpagP, YS1646Δasd/ΔFLG, and YS1646Δasd/ΔFLG/ΔpagP. These three strains, in addition to YS1646 and E. coli D10B cultures, were incubated with serum, or with heat-inactivated (HI) serum, from either pooled mouse blood, or pooled healthy human donors (n=3), for 3 hours at 37° C. After incubation with serum, bacteria were serially diluted and plated on LB agar plates, and the colony forming units (CFUs) were determined.

[1325] In mouse serum, all strains remained 100% viable and were completely resistant to complement inactivation. In human serum, all strains were 100% viable in the heat-inactivated serum. The E. coli D10B strain was completely eliminated after 3 hours in whole human serum. In whole human serum, the YS1646 strain exhibited only 6.37% of live colonies, demonstrating that tumor colonization of the YS1646 clinical strain was limited due to complement inactivation in human blood. For the YS1646Δasd/ΔFLG strain, 31.47% of live colonies remained, and for the YS1646Δasd/ΔpagP strain, 72.9% of live colonies remained, after incubation with human serum for 3 hours. The combined YS1646Δasd/ΔFLG/ΔpagP strain was completely resistant to complement in human serum.

[1326] These data explain why strain YS1646 (VNP20009) has very low tumor colonization when systemically administered. It is shown herein that strain YS1646 is highly sensitive to complement inactivation in human serum, but not in mouse serum. These data explain why limited tumor colonization was observed in humans, while mouse tumors were colonized at a high level. The fljB/fliC or pagP deletions, or the combination of these mutations, partially or completely rescues this phenotype. Thus, the enhanced stability observed in human serum with the YS1646Δasd/ΔpagP, YS1646Δasd/ΔFLG, and YS1646Δasd/ΔFLG/ΔpagP strains provides for increased human tumor colonization.

### Example 6

Salmonella ansB Gene Knockout Strain Engineering and Characterization

[1327] In this example, the YS1646Δasd/ΔFLG/ΔpagP strain was further modified to delete ansB, the gene encoding bacterial L-asparaginase II. Secretion of L-asparaginase II by S. typhimurium in the presence of T-cells has been shown to directly impair T-cell function, by reducing T-cell receptor (TCR) expression, and impairing cytolytic cytokine production. As a result, bacterially-derived asparaginases have been successfully used to treat acute lymphoblastic leukemia (ALL) for decades. Deletion of ansB from the bacterial genome eliminates the ability of the S. typhimurium strain to produce L-asparaginase II, thereby enhancing the function of T-cells in the bacterially-colonized tumor microenvironment.

ΔansB Strain Construction

[1328] The ansB gene was deleted from the YS1646Δasd/ΔFLG/ΔpagP strain using modifications of the methods described in the preceding examples. Synthetic ansB gene homology arm sequences that contained 236 and 251 bases of the left hand and right hand sequence, respectively, flanking the ansB gene, were synthesized and cloned into a plasmid called pSL0230 (SEQ ID NO:332). A kanamycin gene cassette flanked by cre/loxP sites then was cloned into plasmid pSL0230, and the ansB gene knockout cassette was PCR amplified with primers ansb-1 (SEQ ID NO:319) and ansb-2 (SEQ ID NO:320), gel purified, and introduced into strain YS1646Δasd/ΔFLG/ΔpagP, carrying the temperature sensitive lambda red recombination plasmid pKD46, by electroporation. The kanamycin resistance gene then was cured by Cre-mediated recombination, as described above, and the temperature-sensitive plasmids were cured by growth at non-permissive temperature. The ansB gene knockout sequences were amplified by PCR using primers ansb-3 (SEQ ID NO:321) and ansb-4 (SEQ ID NO:322) (see, Table 1), and verified by DNA sequencing. The resulting mutant derivative of YS1646 was designated YS1646Δasd/ΔFLG/ΔpagP/ΔansB.

Deletion of ansB Eliminates Asparaginase Activity In Vitro

[1329] In order to determine whether the YS1646Δasd/ΔFLG/ΔpagP/ΔansB strain produced less L-asparaginase IL, cultures of this strain, along with the ansB-intact YS1646Δasd/ΔFLG/ΔpagP strain, were grown in LB and allowed to reach stationary phase. At this time, 50 μL of conditioned media from the cultures was analyzed for asparaginase activity, using a colorimetric Asparaginase assay kit (Sigma-Aldrich), per the manufacturer's instructions. After a 40 minute incubation, the absorbance units were read on a SpectraMax® M3 Spectrophotometer (Molecular Devices) at an absorbance wavelength of 570 nm.

[1330] Compared to the recombinant L-asparaginase II positive control, which gave an absorbance of 1.95, the absorbance of the ansB-intact YS1646Δasd/ΔFLG/ΔpagP strain was 0.82. Deletion of ansB, in the YS1646Δasd/ΔFLG/ΔpagP/ΔansB strain, however, resulted in background levels of asparaginase activity, detected at an absorbance of 0.109. These data confirm that the ΔansB mutation completely eliminates asparaginase activity.

Deletion of ansB Restores T-Cell Function in an In Vito Co-Culture Assay

[1331] In order to functionally characterize the ansB-deleted strain for the impact of reduced L-asparaginase II activity on T-cells, a co-culture assay was established using strain-infected murine primary bone marrow-derived macrophages (BMMs) in culture with splenic purified T-cells. For this assay, spleens from healthy BALB/c mice were isolated and dissociated, and splenic CD4⁺ and CD8⁺ T-cells were isolated using a mouse T-cell isolation kit (StemCell Technologies), per the manufacturer's instructions. From the isolated T-cells, 2e5 cells were added per well to a Flat-bottom 96-well plate that had been previously coated with 5 μg/ml of an anti-mouse CD3ε antibody (clone 145-2C11, Thermo Fisher Scientific). Conditioned LB media from the YS1646Δasd/ΔFLG/ΔpagP and YS1646Δasd/ΔFLG/ΔpagP/ΔansB cultures, grown to stationary phase, were filtered through a 0.45 μM nylon mesh and added to the T-cells, with or without the addition of 10 μg/ml of an agonistic anti-CD28 antibody for co-stimulation. Control groups containing recombinant asparaginase at 20 U/mL, and normal culture media, were used as controls in the assay. The plate was incubated at 37° C. in a 5% CO₂ incubator. At 24 hours post-incubation, 100 μL of the co-culture supernatants were harvested from the wells, and a murine Th1-specific cytokine bead array (CBA, BioLegend) was performed. Concurrently, T-cells were harvested and analyzed for surface T-cell receptor 0 (TCRs) expression on CD4⁺ and CD8⁺ T-cells by flow cytometry, as well as for intracellular staining of IFNγ, TNFα, and IL-2.

[1332] The results confirmed that the ansB-intact strain (YS1646Δasd/ΔFLG/ΔpagP) used to infect the macrophages, and subsequently co-cultured with T-cells, induces profound T-cell immunosuppression. This was exhibited by marked downregulation of TCRβ surface expression in both CD4⁺ and CD8⁺ T-cells (see table below), compared to media control, and to the positive control of recombinant asparaginase at a concentration of 20 U/mL. Deletion of ansB in the YS1646Δasd/ΔFLG/ΔpagP/ΔansB strain significantly restored TCRβ surface expression in both CD4⁺ (p=0.004) and CD8⁺ T-cells (p=0.002), as compared to the parental YS1646Δasd/ΔFLG/ΔpagP strain.

| | TCRβ Expression (MFI Mean ± SD) | |
|---|---|---|
| Treatment | CD4⁺ T-Cells | CD8⁺ T-Cells |
| Media control | 8141.0 ± 405.9 | 12655.0 ± 534.6 |
| Strain YS1646Δasd/ΔFLG/ | 3817.0 ± 200.8 | 6492.0 ± 260.2 |
| ΔpagP | | |
| Strain YS1646Δasd/ΔFLG/ | 7047.5 ± 204.4 | 13350.0 ± 339.4 |
| ΔpagP/ΔansB | | |
| Recombinant asparaginase II | 4253.5 ± 576.3 | 6305.0 ± 687.3 |
| (20 U/mL) | | |

SD = Standard deviation

[1333] T-cell secretion of cytokines, 24 hours after co-culture, was measured as a marker of T-cell cytolytic function. As shown in the table below, T-cell production of the cytokines IFNγ, TNFα, and IL-2 was markedly lower after treatment with the YS1646Δasd/ΔFLG/ΔpagP strain, as compared to the media control, and was significantly restored by ansB deletion in the YS1646Δasd/ΔFLG/ΔpagP/ΔansB strain (IFNγ (p=0.05), TNFα (p=0.012), and IL-2 (p=0.006)). These data indicate that deletion of ansB in the YS1646Δasd/ΔFLG/ΔpagP/ΔansB strain significantly restores T-cell cytolytic function, as compared to the parental YS1646Δasd/ΔFLG/ΔpagP strain.

| | T-Cell Cytokine Expression | | |
|---|---|---|---|
| | (pg/mL, Mean ± SD) | | |
| Treatment | IFNγ | TNFα | IL-2 |
| Media control | 4176.1 ± 20.8 | 136.0 ± 11.1 | 3118.2 ± 154.3 |
| YS1646Δasd/ΔFLG/ΔpagP | 238.1 ± 0.6 | 35.7 ± 7.1 | 134.9 ± 12.7 |
| YS1646Δasd/ΔFLG/ΔpagP/ | 1788.9 ± 515.5 | 120.5 ± 11.2 | 1947.6 ± 190.5 |
| ΔansB | | | |
| Recombinant asparaginase | 166.2 ± 19.7 | 33.2 ± 3.4 | 114.5 ± 4.8 |
| II (20 U/mL) | | | |

SD = Standard deviation

Deletion of ansB Restores Tumor-Resident T-Cell TCRβ Expression In Vivo

[1334] In in vitro co-culture assays, expression of ansB demonstrated immunosuppressive effects on T-cell function, including downregulation of TCRβ on T-cells by flow cytometry. In order to assess whether this would similarly occur in vivo, the MC38 mouse model of colorectal cancer was utilized.

[1335] For this experiment, 6-8 week-old female C57BL/6 mice (4 mice per group) were inoculated SC in the right flank with MC38 cells (5×10⁵ cells in 100 μL PBS). Mice bearing large established flank tumors were IV injected on day 17 with 1×10⁷ CFUs of the YS1646Δasd/ΔFLG-mCherry strain. Tumors were resected 7 days post IV dosing, and cut into 2-3 mm pieces into gentleMACS™ C tubes (Miltenyi Biotec) filled with 2.5 mL enzyme mix (RPMI-1640 containing 10% FBS with 1 mg/mL Collagenase IV and 20 μg/mL DNase I). The tumor pieces were dissociated using OctoMACS™ (Miltenyi Biotec) specific dissociation program (mouse implanted tumors), and the whole cell preparation was incubated with agitation for 45 minutes at 37° C. After 45 minutes of incubation, a second round of dissociation was performed using the OctoMACS™ (mouse implanted tumor) program, and the resulting single cell suspensions were filtered through a 70 μM nylon mesh into a 50 mL tube. The nylon mesh was washed once with 5 mL of RPMI-1640+10% FBS, and the cells were filtered a second time using a new 70 μM nylon mesh, into a new 50 mL tube. The nylon mesh was washed with 5 mL of RPMI-1640+10% FBS, and the filtered cells were then centrifuged at 1000 RPM for 7 minutes. The resulting dissociated cells were resuspended in PBS and kept on ice before the staining process.

[1336] For the flow-cytometry staining, 100 μL of the single cell suspensions were seeded in wells of a V-bottom 96-well plate. PBS containing a dead/live stain (Zombie Aqua™, BioLegend) and Fc Blocking reagents (BD Biosciences) were added at 100 μL per well, and the cells were incubated on ice for 30 minutes in the dark. After 30 minutes, the cells were washed twice with PBS+2% FBS by centrifugation at 1300 RPM for 3 minutes. Cells were then resuspended in PBS+2% FBS containing fluorochrome-conjugated antibodies (CD45 BV570 clone 30-F11; TCRβ PE clone H57-597; and CD4 FITC clone RM4-5; all from BioLegend) and DAPI (BioLegend), and incubated on ice for 30 minutes in the dark. After 30 minutes, the cells were washed twice with PBS+2% FBS by centrifugation at 1300 RPM for 3 minutes, and resuspended in flow cytometry fixation buffer (Thermo Fisher Scientific). Flow cytometry data were acquired using the ACEA NovoCyte® flow cytometer (ACEA Biosciences, Inc.), and analyzed using the FlowJo™ software (Tree Star, Inc.).

[1337] As shown in the table below, the average mean fluorescence intensity (MFI) for the surface expression of TCRs on tumor-infiltrating CD4⁺ T-cells, following their interaction within tumors with the colonized parental YS1646Δasd/ΔFLG/ΔpagP strain, was significantly lower than with the ansB-deleted YS1646Δasd/ΔFLG/ΔpagP/ΔansB strain (p=0.042), which was higher than even the PBS control-treated mice.

| | MFI for TCRβ Expression on Tumor-Infiltrating CD4⁺ T-Cells | | |
|---|---|---|---|
| | | YS1646Δasd/ | YS1646Δasd/ |
| | PBS | ΔFLG/ΔpagP | ΔFLG/ΔpagP/ΔansB |
| | 13980 | 13933 | 14412 |
| | 14543 | 13480 | 14957 |
| | 14177 | 12087 | 14844 |
| | 13931 | 14010 | 14233 |
| AVG | 14157.8 | 13377.5 | 14611.5 |
| SD | 278.0 | 891.5 | 344.7 |

MFI = mean fluorescence intensity;
AVG = average;
SD = standard deviation

[1338] Taken together, these data confirm the necessity of deleting the ansB gene in order to restore T-cell function, due to the bacterial production of immunosuppressive L-asparaginase IL, and demonstrate the enhanced T-cell function observed with the ansB deletion in the YS1646Δasd/ΔFLG/ΔpagP/ΔansB strain.

### Example 7

### Salmonella csgD Gene Knockout Strain Engineering and Characterization

[1339] The YS1646Δasd/ΔFLG/ΔpagP/ΔansB strain was further modified to delete csgD, a master gene that controls S. typhimurium curli fimbriae formation, cellulose production, and c-di-GMP production. The csgD gene deletion eliminates the possibility of cellulose-mediated biofilm formation, reduces pro-inflammatory signaling, and enhances uptake by host phagocytic cells. This increase in intracellular localization would thereby enhance the effectiveness of plasmid delivery and immunomodulatory protein production.

ΔcsgD Strain Construction

[1340] The csgD gene was deleted from the YS1646Δasd/ΔFLG/ΔpagP/ΔansB strain, using modifications of the methods described in the preceding examples. Synthetic csgD gene homology arm sequences that contained 207 and 209 bases of the left hand and right hand sequence, respectively, flanking the csgD gene, were synthesized and cloned into a plasmid called pSL0196 (SEQ ID NO:333). A kanamycin gene cassette flanked by cre/loxP sites then was cloned into plasmid pSL0196, and the csgD gene knockout cassette was PCR amplified with primers csgd-1 (SEQ ID NO:323) and csgd-2 (SEQ ID NO:324), gel purified, and introduced into strain YS1646Δasd/ΔFLG/ΔpagP/ΔansB, carrying the temperature sensitive lambda red recombination plasmid pKD46, by electroporation. The kanamycin resistance gene then was cured by Cre-mediated recombination, as described above, and the temperature-sensitive plasmids were cured by growth at non-permissive temperature. The csgD gene knockout sequences were amplified by PCR, using primers csgd-3 (SEQ ID NO:325) and csgd-4 (SEQ ID NO:326), and verified by DNA sequencing. The resulting mutant derivative of parental strain YS1646 was designated YS1646Δasd/ΔFLG/ΔpagP/ΔansB/ΔcsgD.

csgD-Deleted Strains Cannot Form RDAR Colonies on Congo Red Plates

[1341] The ability to form Rough Dry And Red (RDAR) colonies after growth on Congo Red plates is a well-validated assay for bacterial biofilm formation. The Rough and Dry texture occurs through cellulose production, and the red is due to the accumulation of pigment by the curli fimbriae surface structures. For this assay, the YS1646Δasd/ΔFLG/ΔpagP/ΔansB strain was compared to the YS1646Δasd/ΔFLG/ΔpagP/ΔansB/ΔcsgD strain for the ability to form the RDAR phenotype after incubation on Congo Red agar plates.

[1342] Congo Red agar plates were prepared with soytone (10 g/L) and yeast extract (5 g/L) (modified LB without NaCl), and complemented with Congo red (40 mg/L) and Coomassie brilliant blue G-250 (20 mg/L). Five microliters of a stationary phase bacterial culture was spotted onto Congo Red plates, and incubated at 37° C. for 16 hours, then transferred to 30° C. and incubated for an additional 120 hours. Visual analysis of colony morphology and color was performed and recorded daily to confirm presence or absence of the RDAR colony morphotype.

[1343] Comparing the colony morphotypes between the two strains, the YS1646Δasd/ΔFLG/ΔpagP/ΔansB/ΔcsgD strain had a smooth phenotype, and the colonies lacked pigment. In comparison, the YS1646Δasd/ΔFLG/ΔpagP/ΔansB strain, still containing the csgD gene, exhibited the classic rough and dry appearance, and clear evidence of pigment uptake. Thus, the functional assay confirms that the ΔcsgD strain is unable to form biofilms, as it lacks curli fimbriae and cellulose production.

csgD-Deleted Strains Demonstrate Superior Anti-Tumor Efficacy in a Highly Refractory Mouse Model of Triple Negative Breast Cancer

[1344] The impact of the csgD deletion in models where the immunostimulatory bacterial therapy colonizes tumors, but has shown limited efficacy, was assessed. This can indicate the presence of bacterially-produced cellulose that can limit uptake into tumor-resident myeloid cells, thereby limiting therapeutic benefit (see, e.g., Crull et al. (2011) Cellular Microbiology 13(8):1223-1233). The difficult-to-treat EMT6 model was utilized, which is a representative model of human triple negative breast cancer (see, e.g., Yu et al. (2018) PLoS ONE 13(11):e0206223). When EMT6 tumor cells are administered orthotopically into the mammary fat pad, as opposed to subcutaneously in the flank, the model is T-cell excluded, highly metastatic, and highly refractory to immunotherapy, including to all approved checkpoint antibodies (see, e.g., Mariathasan et al. (2018) Nature 554:544-548).

[1345] For this experiment, 6-8 week-old female BALB/c mice (5 mice per group) were inoculated in the left mammary fat pad with EMT6 tumor cells (ATCC #CRL-2755) (2×10⁵ cells in 100 μL PBS). Mice bearing 13 day-old established mammary tumors (˜55 mm³ in volume) were IV injected with a single dose of 1×10⁷ CFUs of the csgD-deleted YS1646Δasd/ΔFLG/ΔpagP/ΔansB/ΔcsgD strain, or the parental YS1646Δasd/ΔFLG/ΔpagP/ΔansB strain, and compared to PBS control. The bacterial strains contained a plasmid encoding a constitutively active murine STING (EF-1α muSTING R283G).

[1346] The tumors in the PBS-treated mice grew evenly, reaching a max tumor volume at day 35 (1199.0±298.1 mm³). Mice treated with the csgD-intact strain, YS1646Δasd/ΔFLG/ΔpagP/ΔansB, did not demonstrate evidence of anti-tumor efficacy in this model, also reaching max tumor volume at day 35 (1689.1±537.0). Ex vivo LB plating of these tumors revealed all tumors to be colonized. However, the csgD-deleted strain, YS1646Δasd/ΔFLG/ΔpagP/ΔansB/ΔcsgD, resulted in 3 out of 5 mice being completely cured of both their primary and any metastatic disease (day 60+). Overall tumor growth inhibition (TGI) was 45.7%, with one of the other two remaining tumors partially responding before eventually growing out. The two bacterial strains contained the same plasmid payload, yet only one demonstrated significant anti-tumor efficacy. Thus, in one of the most intractable and highly metastatic syngeneic tumor models, orthotopic EMT6, a strain with a csgD deletion was able to induce systemic anti-tumor efficacy, and result in 60% complete responses.

csgD-Deleted Strains Demonstrate Enhanced Intracellular Uptake In Vivo

[1347] In order to determine whether the csgD-deleted strain demonstrated improved efficacy because of greater bacterial uptake into tumor-resident myeloid cells, an ex vivo gentamicin protection assay was performed (see, e.g., Crull et al. (2011) Cellular Microbiology 13(8):1223-1233). For this experiment, 6-8 week-old female C57BL6 mice (4 mice per group) were inoculated SC in the right flank with MC38 cells (5×10⁵ cells in 100 μL PBS). Mice bearing large established flank tumors were IV injected on day 17 with 1×10⁷ CFUs of the csgD-deleted YS1646Δasd/ΔFLG/ΔpagP/ΔansB/ΔcsgD strain (N=12), or the parental YS1646 strain (N=4). Tumors were resected 7 days post IV dosing, weighed, and minced in RPMI supplemented with 1 mg/mL collagenase IV and 20 mg/mL DNase I, and incubated with shaking at 37° C. for 30 minutes, to generate a single cell suspension. After 30 minutes, the suspension was passed through a 70 mm filter, and the recovered volume was divided into two separate, identical samples. Gentamicin (Thermo Fisher Scientific) was added at a concentration of 200 mg/mL to one of each of the paired samples to kill extracellular bacteria, and the samples were incubated with shaking at 37° C. for 90 minutes. Cell suspension samples were then washed and lysed with 0.05% Triton X, and plated on LB agar plates to enumerate for CFUs.

[1348] The results demonstrate that, compared to the CFUs from YS1646-treated tumors without gentamicin treatment (11925±19859 CFUs), gentamicin treatment resulted in very few CFUs detected from the tumors (51±45 CFUs). This indicates that the bacteria reside largely extracellularly in these tumors, and are thus sensitive to gentamicin elimination. In the csgD-deleted YS1646Δasd/ΔFLG/ΔpagP/ΔansB/ΔcsgD treatment group, the non-gentamicin treated tumors yielded high CFUs, as expected from well-colonized tumors, and treatment with gentamicin yielded less CFUs (1276±2410 CFUs), and much more than in the parental YS1646 strain-treated tumors. This is due to more of the csgD-deleted bacteria residing intracellularly, and thus, being protected from gentamicin. These data demonstrate that the csgD deletion improves intracellular uptake of the bacteria, which can enhance plasmid delivery of immunomodulatory proteins in vivo.

### Example 8

### pATI-1.75 and pATI-1.76 Vector Construction

[1349] A plasmid was designed and synthesized that contains the following features: a pBR322 origin of replication, the asd gene, a kanamycin resistance gene flanked by HindIII sites for curing, and a multiple cloning site for expression cassette insertion. The expression cassette is composed of multiple elements, including eukaryotic promoters, open reading frames (ORFs), post-transcriptional regulatory elements, and polyadenylation signals, that are assembled in various configurations.

[1350] Exemplary promoters include the human cytomegalovirus (CMV) immediate early core promoter encoded directly downstream of the CMV immediate early enhancer sequence, and the core promoter for human elongation factor-1 alpha (EF-1α). Open reading frames (ORFs) can include one or more sequences that each are translated into a protein, and can be separated into distinct polypeptides by insertion of a 2A sequence, whereby eukaryotic ribosomes fail to insert a peptide bond between Gly and Pro residues within the 2A sequence. Examples of 2A sequences are the T2A peptide (see, e.g., SEQ ID NO:327) from the Thosea asigna virus (TaV) capsid protein, and the P2A peptide (see, e.g., SEQ ID NO:328) from porcine teschovirus (PTV). Upstream furin cleavage sites (RRKR), and other enhancer elements, are placed upstream to facilitate cleavage to separate the expressed proteins.

[1351] Examples of post-transcriptional regulatory elements (PREs) include the Woodchuck Hepatitis virus PRE (WPRE; SEQ ID NO:346) and the Hepatitis B virus PRE (HPRE; SEQ ID NO:347), which increase accumulation of the cytoplasmic mRNA of a gene by promoting mRNA nuclear export to the cytoplasm, enhancing 3′ end processing and stability. Examples of polyadenylation signal sequences include the SV40 polyadenylation (SV40polyA, or SV40 pA) signal, and the bovine growth hormone polyadenylation (bGHpolyA, or bGHpA) signal, both of which are 3′ regulatory elements that serve to promote transcriptional termination, and contain the sequence motif recognized by the RNA cleavage complex.

[1352] FIGS. 1A-C depict the pATI-1.75 and pATI-1.76 (FIGS. 1A and 1B, respectively) plasmid inserts; FIG. 1C shows that the Shine-Dalgarno sequence is replaced with a Kozak sequence for translation in eukaryotic cells, such as myeloid cells. Plasmids with such sequences and constructions can be used in embodiments in which the bacteria are designed to deliver RNA, which cannot be translated by the bacterial host, but can be translated in vivo in a eukaryote.

### Example 9

### Designed Heterologous Protein Expression Plasmids Induce Functional Protein Production from Human Cells

### Optimal Expression of Cytokines Established in Human Cells

[1353] In order to exemplify that immunostimulatory cytokines can be expressed from designed plasmids in human cells, a panel of cytokines were cloned into the pATI-1.75 plasmid under the control of the EF-1α promoter. The cytokines include, but are not limited to, murine IL-2 (muIL-2), muIL-12p70, muIL-23, and human IL-2 (huIL-2). For the muIL-15 Receptor-α fused to an IL-15 single chain (muIL-15Rα-IL-15sc), an EF-1α and CMV promoter were tested. HEK293T STING Null cells (InvivoGen) were seeded in 24-well plates coated with poly-L-lysine at 200,000 cells per well, overnight at 37° C. in a 5% CO₂ incubator, to achieve 80% confluency. The following day, 200 ng of each cytokine plasmid DNA was diluted in serum-free media, and added to FuGENE® transfection reagent (Promega), at the proper reagent:DNA ratios, with untransfected wells as negative controls (in duplicates). Cell culture supernatants from each sample were collected at 24 hours post-transfection, and assessed for protein expression by ELISAs specific for each cytokine.

[1354] The muIL-2 construct was evaluated in a murine IL-2 ELISA (R&D Systems), according to the manufacturer's instructions, and an additional version of muIL-2 with codon optimization (muIL-2 CO) also was evaluated. Concentrations of neat supernatant were tested, and yielded an average of 1680 pg/mL of muIL-2 for the muIL-2 construct, and 1812 pg/mL of muIL-2 for the muIL-2 CO construct. These data confirmed the functionality of the constructs, and demonstrated that yield could be improved with codon optimization. The muIL-12p70 construct was evaluated in a murine IL-12 ELISA (R&D Systems), according to the manufacturer's protocol. When supernatants were added neat, a mean of 400 pg/mL of secreted muIL-12p70 was measured, although this was outside the linear range. When the supernatants were diluted 5-fold, an average of 105 pg/mL of secreted muIL-12p70 was detected. For the muIL-23 plasmid, detection of protein was achieved using the murine IL-23 ELISA (BioLegend), per kit instructions. With the supernatant added neat, a mean of 966 pg/mL of muIL-23 was detected. For the human IL-2 plasmid, detection of protein was achieved using the human IL-2 ELISA (Invitrogen), per kit instructions. With the supernatant added neat, an average of 1422 pg/mL of huIL-2 was detected.

[1355] For the muIL-15Rα-IL-15sc construct, expressed using either the EF-1α or CMV promoters, the murine IL-15 ELISA (eBioscience, Inc.) was used, per kit instructions. When added neat, the muIL-15Rα-IL-15sc plasmid with the EF-1α promoter resulted in an average of 131 pg/mL, while the muIL-15Rα-IL-15sc plasmid with the CMV promoter resulted in an average of 289 pg/mL.

[1356] These data validate the plasmid expression constructs encoding immunomodulatory cytokines, both mouse and human, in human cells. Further, they indicate that codon optimization, and the use of promoters such as CMV, can enhance protein expression.

### Post-Transcriptional Regulatory Elements Enhance Cytokine Expression

[1357] In order to determine whether post-transcriptional regulatory elements (PREs), added at the 3′ end of the ORF, enhance expression of immunostimulatory cytokines in human cells, expression of huIL-2, under the control of the EF-1α promoter, was tested with or without the addition of a Woodchuck Hepatitis virus post-transcriptional regulatory element (WPRE) in the pATI-1.75 plasmid. HEK293T STING Null cells (InvivoGen) were seeded in 24-well plates coated with poly-L-lysine at 200,000 cells per well, overnight at 37° C. in a 5% CO₂ incubator, to achieve 80% confluency. The following day, 200 ng of each cytokine plasmid DNA was diluted in serum-free media and added to FuGENE® transfection reagent (Promega), at the proper reagent:DNA ratios, with untransfected wells as negative controls (in duplicates). Cell culture supernatants from each sample were collected at 24 hours post-transfection and assessed for activity by a human IL-2 ELISA (Invitrogen), according to the manufacturer's instructions. Supernatants were added neat, or were diluted 5-fold.

[1358] The results demonstrated that, when supernatant was added neat, compared to the huIL-2 construct without a WPRE, which secreted an average of 1540 pg/mL, the huIL-2 construct with the WPRE secreted 5511 pg/mL, a 3.6-fold increase. In the 5-fold diluted supernatants, the non-WPRE huIL-2 construct secreted 315 pg/mL of huIL-2, while the huIL-2 construct with the WPRE secreted 1441 pg/mL, a 4.6-fold increase. Thus, addition of 3′ post-transcriptional regulatory elements, exemplified by, but not limited to, WPRE, can significantly improve protein expression in human cells.

### Promoter Optimization and Post-Transcriptional Regulatory Elements Enhance Cytokine Production in Primary M2 Macrophages

[1359] While expression of cytokines, such as muIL-15Rα-IL-15sc, was enhanced in human HEK293T cells by use of the CMV promoter, it was determined whether expression of cytokines could similarly be enhanced in donor-derived primary human M2 macrophages, the predominant macrophage phenotype in T-cell excluded, solid human tumors. Additionally, it was determined whether post-transcriptional regulatory elements, such as WPRE, could enhance expression in these cells.

[1360] In order to determine if protein expression could be improved, the promoters EF-1α and CMV were tested for controlling expression of muIL-2, and the WPRE post-transcriptional regulatory element was tested for expression of huIL-2. Frozen human PBMCs, isolated from healthy human donors, were thawed in complete medium (RPMI-1640+1× non-essential amino acids+5% Human AB serum), and washed by centrifugation for 10 minutes at 800 RPM at room temperature. PBMCs were resuspended in PBS+2% FBS, and monocytes were negatively isolated using a CD16 depletion kit (StemCell Technologies). The isolated monocytes were cultured for 6 days in RPMI media containing M-CSF and IL-4, to generate M2 macrophages. For this, isolated untouched monocytes were washed by centrifugation in PBS+2% FBS, and resuspended in complete medium containing 100 ng/mL human M-CSF and 10 ng/mL human IL-4. Isolated monocytes (3e5 per well) were then seeded in a 24-well plate with a final volume of 750 microliters. Two days after the seeding, the cell culture media was entirely aspirated and replaced with fresh complete medium containing 100 ng/mL human M-CSF and 10 ng/mL human IL-4. Two days later (on day 4), 500 μL of complete medium containing 100 ng/mL human M-CSF and 10 ng/mL human IL-4 was added per well, and incubated for 48 hours. On day 6, the cell culture media was entirely aspirated, and replaced with fresh complete medium without cytokines, for transfection with the Viromer® RED mRNA and plasmid transfection reagent (Lipocalyx).

[1361] Transfection with Viromer® RED was performed according to the manufacturer's instructions. Briefly, 500 ng of plasmid DNA, containing the EF-1α-muIL-2 construct, the CMV-muIL-2 construct, the EF-1α-huIL-2 construct, or the EF-la-huIL-2+WPRE construct, as well as untransfected control, were diluted in the provided buffer, and mixed with 0.2 μL of Viromer® RED, and incubated at room temperature for 15 minutes to allow the DNA/Viromer® RED complexes to form. The DNA/Viromer® RED complexes were then slowly added to each well of the 24-well plate (in duplicates), and the plate was incubated at 37° C. in a CO₂ incubator for 24 hours. Supernatants were harvested at 24 hours, and assayed for cytokines using either a murine IL-2 ELISA (R&D Systems), or a human IL-2 ELISA (Invitrogen), per kit instructions.

[1362] The results demonstrated that expression of muIL-2 from neat supernatants harvested from primary human M2 macrophages, transfected with the muIL-2 construct under control of the EF-1α promoter, resulted in the secretion of an average of 59.7 pg/mL of muIL-2. The muIL-2 construct with the CMV promoter yielded an average of 275 pg/mL muIL-2, an almost 5-fold increase. For the human IL-2 ELISA, neat supernatants from the cells transfected with the plasmid lacking the WPRE yielded an average of 170 pg/mL huIL-2. The huIL-2 construct containing the WPRE yielded an average of 219 pg/mL huIL-2. These data confirm that promoters such as CMV, and post-transcriptional regulatory elements such as WPRE, can significantly improve cytokine expression in multiple cells types, including primary human M2 macrophages.

Co-Stimulatory Receptor Ligand 4-1BBL Expressed from Human Cells

[1363] Co-stimulatory molecules, such as 4-1BBL, when expressed on antigen-presenting cells (APCs), can engage 4-1BB expressed on T-cells to promote optimal T-cell function. 4-1BBL is negatively regulated by its cytoplasmic signaling domain. In the late-phase of 4-1BBL ligation of macrophages to T-cells, reverse signaling of the 4-1BBL cytoplasmic domain induces surface translocation of 4-1BBL to bind and form a signaling complex with TLR4. This induces high levels of TNF-α, comparable to LPS activation of TLR4, that leads to immunosuppression of the adaptive immune response (see, e.g., Ma et al. (2013) Sci. Signal. 6(295):ra87).

[1364] In this example, the sequence encoding murine 4-1BBL was cloned into the pATI-1.75 vector. In order to maximally engage T-cells, the reverse signaling of the 4-1BBL cytoplasmic domain was eliminated by deleting the cytoplasmic domain (corresponding to amino acid residues 1-82 of SEQ ID NO:344), generating mu4-1BBLΔcyt. To determine whether mu4-1BBLΔcyt could be functionally expressed on the surface of human cells, HEK-293T cells were utilized. HEK293T STING Null cells (InvivoGen) were seeded in 24-well plates coated with poly-L-lysine at 200,000 cells per well, overnight at 37° C. in a CO₂ incubator, to achieve 80% confluency. The following day, 200 ng of plasmid DNA, encoding mu4-1BBLΔcyt, was diluted in serum-free media and added to FuGENE® transfection reagent (Promega), at the proper reagent:DNA ratio, with untransfected wells as a negative control (in duplicates). After 48 hours, the cells were washed twice with PBS+2% FBS by centrifugation at 1300 RPM for 3 minutes. The cells were then resuspended in PBS+2% FBS, and stained with a PE-conjugated murine anti-4-1BBL antibody (clone TKS-1, BioLegend) and DAPI (dead/live stain). After 30 minutes, the cells were washed twice with PBS+2% FBS by centrifugation at 1300 RPM for 3 minutes, and resuspended in PBS+2% FBS. Flow cytometry data were acquired using the ACEA NovoCyte® flow cytometer (ACEA Biosciences, Inc.), and analyzed using the FlowJo™ software (Tree Star, Inc.).

[1365] As a percentage of live cells, the untransfected control cells showed a percent positive staining for murine 4-1BBL of 14.6. In comparison, 93.4% of the cells that were transfected with the plasmid encoding mu4-1BBLΔcyt, were positive for surface expression of 4-1BBL. These data demonstrate that the pATI-1.75 plasmid can effectively be used to express 4-1BBL at high levels on the surface of human cells.

Soluble TGFβ Receptor II Expressed from Human Cells

[1366] Soluble mouse TGFβ receptor II variants were designed by removing the cytoplasmic and transmembrane portions of the full TGFβ receptor II. Additionally, either a FLAG or Fc tag was added for detection. These variants were cloned into the pATI-1.75 vector under the control of a CMV promoter and a 3′ WPRE. The sequences were confirmed by Sanger sequencing. 1.5×10⁶ HEK293T cells were plated one day prior on 6-well plates coated with poly-L-lysine, to achieve 80% confluency. On the day of transfection, 3 μg of DNA was diluted in serum-free media and added to FuGENE® transfection reagent (Promega) at the proper reagent:DNA ratios. Cell culture supernatants from each sample were collected after 48 hours of incubation. Some supernatant was concentrated in a 10 kDa spin column (Millipore). Direct ELISAs with mouse TGF-β1 (R&D systems) were performed on the supernatant of transfected HEK293T cells. ELISA data, with absorbance at 450 nm, is provided in the table below.

| Construct | Absorbance at 450 nm |
|---|---|
| Concentrated soluble mouse TGFβ receptor II Fc | 1.522 ± 0.025 |
| Soluble mouse TGFβ receptor II Fc | 1.508 ± 0.018 |
| Media (control) | 0.041 ± 0.002 |

[1367] The functionality of these constructs was tested in a T-cell assay. Mouse T-cells were harvested from the spleen using a magnetic isolation kit (StemCell Technologies). T-cells were incubated with anti-mouse CD3E antibody, with or without the soluble receptor, at various concentrations of mouse TGF-beta. T-cell activation was quantified using the mouse TH1 CBA kit (BioLegend), and flow cytometry labeling of CD4, CD8, 4-1BB, and CD69.

[1368] These data demonstrate the ability to express heterologous molecules, such as extracellular receptors fused to an Fc domain, from the plasmid engineered for delivery by the immunostimulatory bacteria to eukaryotic, such as human, cells.

Expression of a CD3×CD19 Bispecific T-cell Engager from Human Cells

[1369] A CD3×CD19 bispecific T-cell engager (BiTE®), containing a FLAG tag and a His tag, was cloned into the pATI-1.75 vector under the control of a CMV promoter and with a 3′ WPRE. The sequences were confirmed by Sanger sequencing. 1.5×10⁶ HEK293T cells were plated one day prior on 6-well plates coated with poly-L-lysine, to achieve 80% confluency. On the day of transfection, 3 μg of DNA was diluted in serum-free media and added to FuGENE® transfection reagent (Promega), at the proper reagent:DNA ratios. Cell culture supernatants from each sample were collected after 48 hours of incubation. Some supernatant was concentrated in a 10 kDa spin column (Millipore).

[1370] The functionality of this construct was tested by binding of the CD3×CD19 BiTE® to Raji and Jurkat-Lucia™ NFAT cells (InvivoGen). The BiTE® was detected using an anti-FLAG-APC (BioLegend), using flow cytometry. One well of 50,000 cells was run for each condition. The mean fluorescence intensity (MFI) of the APC positive events, and the number of cells gated as APC positive, are provided in the table below.

| | | Mean Fluorescence |
|---|---|---|
| | Number of | Intensity (MFI) of |
| Sample | APC⁺ Cells | APC⁺ Cells |
| Raji cells with anti-FLAG-APC only | 41 | 1439 |
| Raji cells with CD3xCD19 BiTE ® | 10307 | 7408 |
| Raji cells with concentrated | 11248 | 16045 |
| CD3xCD19 BiTE ® | | |
| Jurkat cells with anti-FLAG-APC only | 100 | 1519 |
| Jurkat cells with CD3xCD19 BiTE ® | 18482 | 4584 |
| Jurkat cells with concentrated | 17563 | 14089 |
| CD3xCD19 BiTE ® | | |

[1371] Additionally, this construct was tested in a co-culture of Raji and Jurkat-Lucia™ NFAT cells. Cells were incubated with or without the CD3×CD19 BiTE®, and the luminescence (corresponding to Lucia™ luciferase activity resulting from NFAT activation) was detected at 6 hours and 24 hours post-addition of the BiTE®. The luminescence readings of this assay are provided in the table below.

| | Concentrated | | |
|---|---|---|---|
| | CD3xCD19 | CD3xCD19 | |
| Experimental | BiTE ® | BiTE ® | Medium |
| Conditions | (Luminescence) | (Luminescence) | (Luminescence) |
| 2 Raji:1 Jurkat, 6 | 12110.5 ± 837.9 | 3445.0 ± 717.0 | 44.5 ± 10.6 |
| hour time point | | | |
| 1 Raji:1 Jurkat, 6 | 4337.0 ± 219.2 | 2057.5 ± 20.5 | 26.0 ± 15.6 |
| hour time point | | | |
| 2 Raji:1 Jurkat, 24 | 47159.5 ± 1038.7 | 11274 ± 408.7 | 114.5 ± 57.3 |
| hour time point | | | |
| 1 Raji:1 Jurkat, 24 | 18614 ± 1540.1 | 6017 ± 31.1 | 122 ± 15.6 |
| hour time point | | | |

[1372] These data demonstrate the ability to express heterologous molecules, such as scFvs, alternative antibody constructs, and bispecific T-cell engagers, in eukaryotic, such as human, cells, from the engineered plasmid that can be delivered by the immunostimulatory bacteria herein.

### Example 10

### Immunostimulatory Bacterial Strains Efficiently Deliver Plasmids and Express Cytokines in Human Cells

### Flagella-Deleted Strains Containing Plasmids Encoding Murine IL-2 Induce Functional IL-2 Protein Expression Following Infection in Human Monocytes

[1373] As described above, the flagellin genes fljB and fliC were deleted from the YS1646 strain of S. typhimurium with the asd gene deleted, generating the strain YS1646Δasd/ΔFLG. This strain was electroporated with a plasmid containing an expression cassette with the EF-1α promoter and the murine cytokine IL-2 (muIL-2). In addition, the YS1646Δasd/ΔFLG strain was electroporated with an expression plasmid encoding murine IL-156, as a control for a non-cognate cytokine. Additional constructs were created using the CMV promoter.

[1374] To determine whether these strains containing expression plasmids can infect human monocytes and induce the production of murine IL-2, THP-1 human monocytic cells were plated at 50,000 cells/well in RPMI 1640 (Gibco™)+10% Nu-Serum™ (Corning®), one day prior to infection. The cells were infected with the various strains at an MOI of 50 for one hour in RPMI, then washed 3 times with PBS, and resuspended in RPMI+100 μg/mL gentamicin (Sigma). Supernatants were collected 48 hours later from a 96-well plate, and assessed for the concentration of murine IL-2 by ELISA (R&D Systems).

[1375] The concentration of muIL-2 detected in the YS1646Δasd/ΔFLG-IL-158 control wells was very low (6.52 pg/mL), as expected, and reflective of some cross-reactivity to the endogenous human IL-2 receptor. In contrast, the YS1646Δasd/ΔFLG-muIL-2 strain induced an average of 35.1 pg/mL of muIL-2. These data demonstrate the feasibility of expressing and secreting functional heterologous proteins, such as IL-2, from the S. typhimurium immunomodulatory platform strains, in human monocytes.

Flagella-Deleted and pagP-Deleted Strains, Containing Plasmids Encoding Murine IL-2, Demonstrate Enhanced IL-2 Expression, Compared to Transfected muIL-2 DNA, in Primary Human M2 Macrophages

[1376] The relative efficiencies of transfection (i.e., direct transfer of plasmid DNA) vs. bactofection (i.e., transfer of plasmid DNA by the immunostimulatory bacterial strains herein), in primary human M2 macrophages, for expression of muIL-2, were compared. Frozen human PBMCs, isolated from healthy human donors, were thawed in complete medium (RPMI-1640+1× non-essential amino acids+5% Human AB serum), and washed by centrifugation for 10 minutes at 800 RPM at room temperature. PBMCs were resuspended in PBS+2% FBS, and monocytes were negatively isolated using a CD16 depletion kit (StemCell Technologies). Isolated untouched monocytes were then washed by centrifugation in PBS+2% FBS, and resuspended in complete medium containing 100 ng/mL human M-CSF and 10 ng/mL human IL-4. Isolated monocytes (3e5 per well) were then seeded in a 24-well plate, with a final volume of 750 microliters. Two days after the seeding, the cell culture media was entirely aspirated and replaced with fresh complete medium containing 100 ng/mL human M-CSF and 10 ng/mL human IL-4. Two days later (on day 4), 500 μL of complete medium containing 100 ng/mL human M-CSF and 10 ng/mL human IL-4 was added per well, and incubated for 48 hours. On day 6, the cell culture media was entirely aspirated, and replaced with fresh complete medium without cytokines, for transfection with Viromer® RED mRNA and plasmid transfection reagent (Lipocalyx).

[1377] Transfection with Viromer® RED was performed according to the kit instructions. Briefly, 500 ng of plasmid DNA from the constructs encoding muIL-2 under control of the EF-1α promoter (EF-1α-muIL-2), or under control of the CMV promoter (CMV-muIL-2), or untransfected control, were diluted in the provided buffer, mixed with 0.2 μL of Viromer® RED transfection reagent, and incubated at room temperature for 15 minutes to allow the DNA/Viromer® RED complexes to form. The DNA/Viromer® RED complexes were then slowly added to each well of the 24-well plate containing the monocytes (in duplicates), and the plate was incubated at 37° C. in a CO₂ incubator for 24 hours. Additional wells of cells were infected at an MOI of 450 with the YS1646Δasd/ΔFLG/ΔpagP strain containing the EF-1α-muIL-2 construct, or the YS1646Δasd/ΔFLG/ΔpagP strain containing the CMV-muIL-2 construct, for one hour in RPMI, then washed 3 times with PBS, and resuspended in RPMI+100 μg/mL gentamicin (Sigma).

[1378] After 24 hours, the cells were lysed with 350 μL Buffer RLT with β-mercaptoethanol (β-ME) (Qiagen), and RNA extraction was performed using the Qiagen RNeasy® Mini Kit with the following modifications. A genomic DNA elimination step, using an RNase-Free DNase kit (Qiagen) was included in the kit to remove genomic DNA from the total RNA. Total RNA concentration was measured using a NanoDrop™ One^{C} UV-Vis Spectrophotometer (Thermo Fisher Scientific). The purity of each sample also was assessed from the A₂₆₀/A₂₃₀ absorption ratio. RNA was stored at −80° C. without freeze-thawing until reverse-transcription was performed. cDNA synthesis was performed using 0.4-1 μg of template RNA using a C1000 Touch Thermal Cycler (Bio-Rad) and SuperScript™ VILO™ Master Mix (Invitrogen) in a 30 μL reaction, according to the manufacturer's instructions.

[1379] qPCR (quantitative polymerase chain reaction) was performed with a CFX96™ Real-Time PCR Detection System (Bio-Rad). SYBR® primers for murine IL-2 (Assay ID: qMmuCED0060978) were purchased from Bio-Rad. The qPCR reaction (20 μL) was conducted per protocol, using the iTaq™ Universal SYBR® Green Supermix (Bio-Rad). The standard thermocycling program on the Bio-Rad CFX96™ Real-Time System consisted of a 95° C. denaturation for 30 seconds, followed by 40 cycles of 95° C. for 5 seconds and 60° C. for 30 seconds. Reactions with template-free control were included for each set of primers on each plate. All samples were run in duplicate, and the mean C_{q} values were calculated. Quantification of the target mRNA was normalized using Gapdh (glyceraldehyde-3-phosphate dehydrogenase) reference mRNA (Bio-Rad, Assay ID: qMmuCED0027497). ΔC_{q} was calculated as the difference between target (muIL-2) and reference (GAPDH) gene. ΔΔC_{q} was obtained by normalizing the ΔC_{q} values of the treatments, to the ΔC_{q} values of the non-treatment controls. Fold increase was calculated as 2\hat{ }-ΔΔC_{q}. The fold increases relative to untransfected/uninfected control are shown in the table below.

| | Fold Increase |
|---|---|
| Treatment Group | in muIL-2 |
| YS1646 | <1 |
| YS1646Δasd/ΔFLG/ΔpagP, EF-1α-muIL-2 (infection) | 74 |
| YS1646Δasd/ΔFLG/ΔpagP, CMV-muIL-2 (infection) | 668.2 |
| Transfection, EF-1α-muIL-2 | 249.4 |
| Transfection, CMV-muIL-2 | 1527 |

[1380] The results show that, with either transfection or bactofection, the CMV promoter demonstrated superior expression of muIL-2, compared to the EF-1α promoter, in primary human M2 macrophages. While transfection using the most efficient reagent currently available gave the highest levels of muIL-2 expression, bactofection also elicited high expression levels of muIL-2, demonstrating the high efficacy of heterologous gene transfer with the bacterial platforms provided herein.

### Example 11

### Bacterial Strains Efficiently Deliver Immunomodulatory Plasmids In Vivo and Demonstrate Potent Anti-tumor Activity

Flagella-Deleted Strains Containing Plasmids Encoding Murine IL-2 Induce Potent Tumor Inhibition without Toxicity in a Mouse Model of Colorectal Carcinoma

[1381] In order to demonstrate that S. typhimurium strains containing the muIL-2 expression plasmids can induce anti-tumor efficacy without additional toxicity, the YS1646Δasd/ΔFLG strain, containing the muIL-2 plasmid, was compared to PBS control, for safety and efficacy in the subcutaneous flank MC38 colorectal adenocarcinoma model. For this study, 6-8 week-old female C57BL/6 mice (5 mice per group) were inoculated SC in the right flank with MC38 cells (5×10⁵ cells in 100 μL PBS). Mice bearing established flank tumors were IV injected on day 11 with 5×10⁵ CFUs of the YS1646Δasd/ΔFLG-muIL-2 strain, or with PBS vehicle control. Tumor measurements and body weights were recorded twice weekly.

[1382] The results revealed that the YS1646Δasd/ΔFLG-muIL-2 strain demonstrated significant tumor growth inhibition (TGI) compared to PBS (76.7% TGI, P=0.005, day 21), with tumors being well controlled out to day 40 post-implantation, when the PBS mice were euthanized. The therapy was well tolerated, even without further strain attenuation, and the weight loss early on was transient and resulted in only a 3.4% reduction in body weight, compared to PBS control at day 40. Thus, the immunostimulatory strain expressing muIL-2 potently inhibits tumor growth inhibition, in a safe and non-toxic manner, in a model of colorectal carcinoma.

### Flagella-Deleted Strains Containing Plasmids Encoding Murine IL-2 Induce Tumor-Specific Production of IL-2 In Vivo

[1383] The level of tumor muIL-2 expression, relative to spleen, was determined in order to confirm the tumor-specific nature of delivery. 6-8 week-old female C57BL/6 mice (5 mice per group) were inoculated SC in the right flank with MC38 colorectal adenocarcinoma cells (5×10⁵ cells in 100 μL PBS). Mice bearing established flank tumors were IV injected on day 10 with 5×10⁵ CFUs of the YS1646Δasd/ΔFLG-muIL-2 strain, or with PBS vehicle control. On day 31 post tumor implantation, tumors and spleens were excised and processed for tumor extracts using the GentleMACS™ Octo Dissociator and the M tubes (Miltenyi Biotec) molecule setting in 2 mL of PBS. The homogenates were spun down at 1300 RPM for 10 minutes, and the supernatant was collected and assayed using the muIL-2 CBA kit (BD Biosciences), according to the manufacturer's instructions. Results were quantified as pg/mL of muIL-2, and standardized to per gram of tissue.

[1384] The PBS control tumors exhibited background levels of muIL-2 in the tumor, with a mean of 134 pg/mL per gram of tumor tissue. The YS1646Δasd/ΔFLG-muIL-2 treated tumors yielded a much higher mean of 389.9 pg/mL of muIL-2 per gram of tumor tissue, demonstrating the ability to detect elevated muIL-2 levels due to plasmid delivery in the tumor-resident myeloid cells. The level of muIL-2 in the spleen, from mice injected with the YS1646Δasd/ΔFLG-muIL-2 strain, was an average of 6.6 pg/mL per gram of tissue, which was lower than in the PBS controls. This specificity for the tumor enables delivery of immunomodulatory levels of IL-2, in a much safer manner than conventional cytokine therapies, which are not tumor-targeted.

### Attenuated Bacterial Strains Containing Plasmids Encoding Murine Co-stimulatory Receptor Ligand 4-1BBL Demonstrate Curative Effects In Vivo

[1385] In order to determine whether tumor-specific delivery of a co-stimulatory molecule, such as 4-1BBL, enhances anti-tumor efficacy, a bacterial strain containing a plasmid encoding 4-1BBL(Δcyt) (described above), under control of the CMV promoter and containing a 3′ WPRE, was assessed in the MC38 murine model of colorectal adenocarcinoma. For this study, 6-8 week-old female C57BL/6 mice (5 mice per group) were inoculated SC in the right flank with MC38 colorectal adenocarcinoma cells (5×10⁵ cells in 100 μL PBS). Mice bearing established flank tumors were IV injected on day 10 with 1×10⁷ CFUs of strain YS1646Δasd/ΔFLG/ΔpagP/ΔansB containing the CMV-4-1BBL(Δcyt)-WPRE plasmid, or with PBS vehicle control.

[1386] The therapy was very well tolerated, with only an initial weight loss of 2.2% that had fully recovered 3 days later. Compared to PBS, the 4-1BBL(Δcyt) therapy was highly effective and curative (90.7% TGI, 60% complete response (CR), day 30). These data demonstrate the potency and safety of delivering immunostimulatory bacteria containing plasmids encoding co-stimulatory molecules in a tumor-specific manner.

### Example 12

### Identification of Gain-of-Function Mutations in Genes That Promote Constitutive Type I Interferon Production

[1387] Instances of subjects presenting with severe auto-inflammatory conditions and vasculopathies of unknown etiology occur, and, often derive from mutations. The cause for these conditions has, and can be, identified. Steps to identify a mutational basis for such a pathology are as follows. In step one, intact genomic DNA is obtained from patients experiencing symptoms, and from healthy individuals. Genome sequence is performed, such as whole exome sequencing, and then introns and exons are analyzed. Analysis of genes, and identification of mutations in products in the pathways associated with the expression of type I interferon (IFN), is performed. From this analysis, mutations are discovered in genes known to lead to constitutive functional activation of the encoded proteins, and subsequent persistent expression of type I IFN.

[1388] After identification of mutations, cDNAs encoding the full-length gene, with and without the identified mutation(s), are transfected into a reporter cell line that measures expression of type I IFN. For example, a reporter cell line can be generated where the expression of luciferase is placed under control of the promoter for IFN-β. A gain-of-function (GOF) mutant that is constitutively active will promote the expression of IFN-β, whereas the unstimulated wild-type (WT) protein will not. In the case of known STING SAVI (STING-associated vasculopathy with onset in infancy) mutants, the WT STING stimulation of IFN-β requires the addition of increasing exogenous levels of cGAMP to directly activate WT STING. Constitutively active mutations stimulate the expression of IFN-β in a cGAMP-independent manner. Exemplary gain-of-function mutations in each of STING, RIG-I, MDA5, IRF3, and IRF7 are set forth below in Example 15, and discussed elsewhere herein. Other such genes, in which gain-of-function mutations can be identified in subjects, or produced by in vitro mutation and screening, include, but are not limited to, TRIM56, RIP1, Sec5, TRAF3, TRAF2, TRAF6, STAT1, LGP2, DDX3, DHX9, DDX1, DDX9, DDX21, DHX15, DHX33, DHX36, DDX60, and SNRNP200.

### Expression of Functional Constitutive Type I IFN Mutants in Human Cells

[1389] Human STING (allele R232) and IRF3 gain-of-function (GOF) mutants (see, table below) were cloned into the pATI-1.75 vector, and the sequences were confirmed by PCR. To determine whether the STING and IRF3 GOF expression plasmids could induce functional type I IFN in human cells, the plasmids were assessed using HEK293T STING Null Reporter cells (InvivoGen), which do not contain endogenous STING. These cells express secreted embryonic alkaline phosphatase (SEAP), placed under the control of the endogenous IFN-stimulated response element (ISRE) promoter, where the coding sequence of ISRE has been replaced by the SEAP ORF using knock-in technology. Type I interferon activity can be assessed by monitoring type I IFN-stimulated SEAP production in the cell culture supernatants.

[1390] To test the relative production of type I IFN by each of the GOF mutants, 1×10⁵ 293T-Dual™ Null cells (InvivoGen) were plated one day prior on plates coated with poly-L-lysine, to achieve 80% confluency, in a 24-well plate. On the day of transfection, 200 ng of plasmids encoding a panel of STING and IRF3 GOF mutants, including a STING wild-type (WT) and IRF3 WT control, and a negative control STING mutant that has been reported in the literature to be non-functional in human cells (STING V155R negative control (NC)), were diluted in serum-free media and added to FuGENE® transfection reagent (Promega) at the proper reagent:DNA ratios. Cell culture supernatants from each sample were collected after overnight incubation, and 10 μL of the cell culture supernatants was added to 50 μL QUANTI-Blue™ reagent (InvivoGen), which is used for measuring SEAP. Type I interferon activation was determined by measuring ISRE-induced SEAP activity on a SpectraMax® M3 Spectrophotometer (Molecular Devices), at an absorbance wavelength of 650 nm.

[1391] As shown in the table below, all GOF mutants were able to induce type I IFN activity in a STING ligand-independent manner in human cells, compared to the wild-type and negative controls, which did not induce type I IFN activity. The highest levels of type I IFN induction were observed with the human STING R284G variant, and the human IRF3 S396D phosphomimetic variant. These data support the ability of the plasmids encoding GOF mutants to produce functional, constitutively active STING and constitutively active phosphomimetic IRF3, that can induce type I IFN in a cGAMP-independent manner.

| | Mean Absorbance | Standard |
|---|---|---|
| GOF Mutant | (650 nm) | Deviation |
| Plasmid control | 0.049 | ±0.002 |
| huSTING WT | 0.144 | ±0.004 |
| huSTING V147L | 1.399 | ±0.015 |
| huSTING N154S | 1.382 | ±0.008 |
| huSTING V155M | 1.360 | ±0.048 |
| huSTING C206Y | 1.566 | ±0.121 |
| huSTING R281Q | 1.546 | ±0.132 |
| huSTING R284G | 1.831 | ±0.039 |
| huSTING V155R (NC) | 0.181 | ±0.014 |
| huIRF3 WT | 0.781 | ±0.073 |
| huIRF3 S396D | 1.922 | ±0.131 |

### Infection of Flagella-Deleted Strains, Containing Plasmids Encoding Constitutively Active Type I IFN Mutants, Converts Human M2 Macrophages to Type I IFN-Producing M1 Macrophages

[1392] It was determined if primary human M2 macrophages, infected with flagella-deleted strains containing plasmids encoding constitutively active type I IFN GOF variants, could be converted to producers of type I IFN and downstream chemokines, such as CXCL10 (also known as IP-10).

[1393] Frozen human PBMCs, isolated from healthy human donors, were thawed in complete medium (RPMI-1640+1× non-essential amino acids+5% Human AB serum), and washed by centrifugation for 10 minutes at 800 RPM at room temperature. PBMCs were resuspended in PBS+2% FBS, and monocytes were negatively isolated using a CD16 depletion kit (StemCell Technologies). To generate primary human M2 macrophages, isolated untouched monocytes were washed by centrifugation in PBS+2% FBS, and resuspended in complete medium containing 100 ng/mL human M-CSF and 10 ng/mL human IL-4. Isolated monocytes (3e5 per well) were then seeded in a 24-well plate with a final volume of 750 microliters. Two days after the seeding, the cell culture media was entirely aspirated and replaced with fresh complete medium containing 100 ng/mL human M-CSF and 10 ng/mL human IL-4. Two days later (on day 4), 500 μL of complete medium containing 100 ng/mL human M-CSF and 10 ng/mL human IL-4 was added per well, and incubated for 48 hours. On day 6, the cell culture media was entirely aspirated and replaced with fresh complete medium without cytokines. Duplicate wells were infected at an MOI of 450, for one hour in RPMI, with the following strains: YS1646Δasd/ΔFLG containing a plasmid encoding wild-type (WT) human (hu) STING; YS1646Δasd/ΔFLG containing a plasmid encoding the huSTING R284G variant; YS1646Δasd/ΔFLG containing a plasmid encoding WT huIRF3; YS1646Δasd/ΔFLG containing a plasmid encoding the huIRF3 S396D variant; or a strain containing a plasmid control. The cells were then washed 3 times with PBS, and resuspended in RPMI+100 μg/mL gentamicin (Sigma). As a control, the STING agonist 3′5′ RpRp c-di-AMP (InvivoGen), an analog of the clinical compound ADU-S100, was added to the cells at a concentration of 10 μg/mL.

[1394] After 24 hours, the cells were lysed with 350 μL Buffer RLT with β-ME (Qiagen), and RNA extraction was performed using the Qiagen RNeasy® Mini Kit with the following modification. A genomic DNA elimination step, using an RNase-Free DNase kit (Qiagen), was included to remove genomic DNA from the total RNA. Total RNA concentration was measured using a NanoDrop™ One^{C} UV-Vis Spectrophotometer (Thermo Scientific). The purity of each sample also was assessed from the A₂₆₀/A₂₃₀ absorption ratio. RNA was stored at −80° C. without freeze-thawing until reverse-transcription was performed. Synthesis of cDNA was performed from 0.4-1 μg of template RNA using a C1000 Touch Thermal Cycler (Bio-Rad) and SuperScript™ VILO™ Master Mix (Invitrogen) in a 30 μL reaction, according to the manufacturer's instructions.

[1395] qPCR was performed with a CFX96™ Real-Time System (Bio-Rad). SYBR® primers for huCXCL10 (qHsaCED0046619), huIRF3 (qHsaCID3013122), huSTING (qHsaCID3010565), and huIFNβ1 (qHsaCED0046851) were purchased from Bio-Rad. The qPCR reaction (20 μL) was conducted per protocol, using the iTaq™ Universal SYBR® Green Supermix (Bio-Rad). The standard thermocycling program on the BioRad CFX96™ Real-Time System consisted of a 95° C. denaturation for 30 seconds, followed by 40 cycles of 95° C. for 5 seconds and 60° C. for 30 seconds. Reactions with template free control were included for each set of primers on each plate. All samples were run in duplicate, and the mean C_{q} values were calculated. Quantification of the target mRNA was normalized using Gapdh reference mRNA (Bio-Rad, qMmuCED0027497). ΔC_{q} was calculated as the difference between the target and reference gene. ΔΔC_{q} was obtained by normalizing the ΔC_{q} values of the treatments to the ΔC_{q} values of the non-treatment control. Fold increase was calculated as 2\hat{ }-ΔΔC_{q}. The values are shown in the table below, as the average of the duplicate wells.

[1396] As shown in the table below, compared to the infection of the plasmid control, strains of YS1646Δasd/ΔFLG, containing plasmids encoding WT huSTING and huSTING R284G, induced high levels of STING expression, which were significantly higher compared to the plasmid control, or the small molecule STING agonist. Similarly, the strains containing plasmids encoding WT huIRF3 and huIRF3-S396D induced high levels of IRF3 expression, which were significantly higher than the plasmid control, or the small molecule STING agonist. The bacterial strain containing a plasmid encoding the huSTING R284G variant induced much higher expression of IFNβ and CXCL10, as compared to the strain containing a plasmid encoding WT huSTING. This demonstrates the ability of the strain, containing a plasmid encoding a constitutively active STING GOF variant, to convert a human primary, immunosuppressive M2 macrophage, into an M1, type I IFN producing, cell. While the strains containing plasmids encoding WT huIRF3 and huIRF3-S396D both induced more, or similar levels of IFNβ, they induced less CXCL10 than the huSTING-R284G variant.

| | Fold Expression Over Untransfected Control | | | |
|---|---|---|---|---|
| GOF Mutant | STING | IRF3 | IFNβ | CXCL10 |
| Plasmid Control | 22.3 | 0 | ND | ND |
| WT huSTING | 24017.1 | ND | 3.4 | 3934.5 |
| huSTING R284G | 36542.7 | ND | 20 | 23484.5 |
| WT huIRF3 | 22.7 | 478.9 | 17.5 | 10766.2 |
| huIRF3-S396D | 30.8 | 346.4 | 26.3 | 15696.1 |
| 3′5′ RpRp c-di-AMP | 244.8 | 1.11 | 1.77 | 594.1 |

ND = No Data

[1397] These data demonstrate the expression of constitutively active GOF type I IFN variants in human primary M2 macrophages, and converting these cells to M1-like, type I IFN producing, cells.

### Example 13

### Immunostimulatory Bacteria, Containing Plasmids Encoding Constitutive Type I IFN Variants, Demonstrate Potent Anti-tumor Immunity in a Murine Model of Colorectal Cancer

### Human GOF STING Mutants Show Anti-Tumor Activity in Mouse Models

[1398] To demonstrate that immunostimulatory bacterial strains, containing expression plasmids encoding constitutively active STING variants, induce anti-tumor efficacy, strain YS1646Δasd/ΔFLG (with a knockout of both flagellin genes fljB and fliC) was electroporated with a plasmid containing an expression cassette for human STING with the allele R232 and the GOF mutation V155M (huSTING V155M), behind the human elongation factor-1 alpha (EF-1α) promoter, and was compared to strain YS1646 alone, and to a PBS vehicle control. The gene encoding huSTING V155M was generated using DNA synthesis and cloned into the pATI-1.75 vector. In order to evaluate whether a constitutively active human STING variant could demonstrate anti-tumor activity in mice, 6-8 week-old female C57BL/6 mice (5 mice per group) were inoculated SC in the right flank with MC38 colorectal adenocarcinoma cells (5×10⁵ cells in 100 μL PBS). Mice bearing established flank tumors were IV injected on day 8 with 5×10⁵ CFUs of strain YS1646Δasd/ΔFLG-huSTING V155M, with strain YS1646, or with PBS control.

[1399] The results showed that the YS1646 parental strain was only mildly effective as an anti-tumor therapy, and was not curative (35% TGI, p=NS (not significant), day 28), in line with previously published data. The more attenuated strain, containing a plasmid encoding constitutively active human STING, YS1646Δasd/ΔFLG-huSTING V155M, however, elicited significant tumor control (60% TGI, p<0.05, day 28) compared to PBS, and had a cure rate of 20%. Thus, an immunostimulatory bacterial strain that delivers a constitutively active STING variant potently inhibits tumor growth, and demonstrates curative effects in a model of colorectal adenocarcinoma.

### Murine Phosphomimetic IRF3 Shows Curative Effects In Vivo

[1400] The murine version of the phosphomimetic human IRF3 variant was designed, designated muIRF3-S388D, and evaluated in a murine model of colorectal adenocarcinoma. Strain YS1646Δasd/ΔFLG was electroporated with a plasmid containing an expression cassette for murine IRF3 with the GOF mutation S388D (muIRF3-S388D), behind the human elongation factor-1 alpha (EF-1α) promoter, and was compared to PBS vehicle control. The gene encoding muIRF3-S388D was generated using DNA synthesis and cloned into the pATI-1.75 vector. 6-8 week-old female C57BL/6 mice (5 mice per group) were inoculated SC in the right flank with MC38 colorectal adenocarcinoma cells (5×10⁵ cells in 100 μL PBS). Mice bearing established flank tumors were IV injected on day 10 with 5×10⁵ CFUs of strain YS1646Δasd/ΔFLG-EF-1α-muIRF3-S388D, and compared to PBS vehicle control.

[1401] The therapy was very well tolerated, with an initial weight loss nadir of only 0.3%. Compared to PBS, the bacterial strain containing the plasmid encoding the muIRF3-S388D GOF mutant was highly effective and curative (81.8% TGI, 60% CR, day 42). These data demonstrate the potency and safety of delivering constitutively active type I IFN inducing variants in a tumor-specific manner.

### Murine STING GOF Variants Show Potent and Curative Anti-Tumor Activity

[1402] A panel of murine orthologs of the human STING variants, discovered in human patients, was designed. These orthologs differ by one codon from the human variants, and were cloned into the pATI-1.75 vector under the control of an EF-1α promoter, to yield the following set of mutants: muSTING N153S, muSTING V154M, muSTING R280Q, muSTING V146L, muSTING R283G, and muSTING C205Y, among others. The STING variants were evaluated in the MC38 model of murine adenocarcinoma for anti-tumor efficacy. For the studies, 6-8 week-old female C57BL6 mice (5 mice per group) were inoculated SC in the right flank with MC38 colorectal adenocarcinoma cells (5×10⁵ cells in 100 μL PBS). Mice bearing established flank tumors were IV injected on day 10 with 5×10⁵ CFUs of strain YS1646Δasd/ΔFLG, containing a plasmid with EF-1α driving the expression of muSTING N153S, muSTING V154M, muSTING R280Q, muSTING V146L, or muSTING R283G, or a scrambled shRNA plasmid control, and compared to PBS vehicle control.

[1403] In this experiment, strain YS1646Δasd/ΔFLG EF-1α-shSCR (scrambled plasmid control) demonstrated anti-tumor efficacy as compared to PBS control (73% TGI, day 26), which was much more potent than the YS1646 parental strain has shown historically. This can be due to inherently immunostimulatory elements on the plasmid itself, such as CpGs and RNAi stimulatory elements. However, this therapy was the least well tolerated of the group, demonstrating a weight loss nadir of 9.9% that only resolved at the very end of the study. In contrast, the constitutively active murine STING mutants resulted in a lower weight loss that was transient and that resolved within days. The relative anti-tumor efficacy of these variants revealed differences in activity, with only two variants demonstrating curative effects and enhanced efficacy over the plasmid control, muSTING N153S, and muSTING R283G.

| Murine STING | TGI vs. PBS, | Complete | Weight Loss |
|---|---|---|---|
| GOF Mutant | Day 26 | Response | Nadir and Day |
| Plasmid Control | 73.0% | 0/5 | 9.9%, day 19 |
| muSTING N153S | 81.7% | 1/5 | 6.2%, day 12 |
| muSTING V154M | 69.4% | 0/5 | 4.3%, day 12 |
| muSTING R280Q | 68.7% | 0/5 | 5.4%, day 12 |
| muSTING V146L | 63.4% | 0/5 | 2.8%, day 12 |
| muSTING R283G | 81.2% | 1/5 | 6.9%, day 12 |

[1404] In a follow-up study, the murine STING C205Y variant was tested along with the R283G and N153S variants, to compare their anti-tumor efficacy. 6-8 week-old female C57BL/6 mice (5 mice per group) were inoculated SC in the right flank with MC38 colorectal adenocarcinoma cells (5×10⁵ cells in 100 μL PBS). Mice bearing established flank tumors were IV injected on day 9 with 5×10⁵ CFUs of strain YS1646Δasd/ΔFLG containing a plasmid with EF-1α driving the expression of muSTING N153S, muSTING R283G, or muSTING C205Y, and compared to PBS vehicle control. As before, the STING variants were well tolerated, and only a transient dip in weight loss was observed that resolved quickly. This is likely due to on-target therapy, as it is also observed with the small molecule STING agonists. The efficacy of the two constitutively active murine STING variants, muSTING N153S and muSTING R283G, was nearly identical to the previous study, although the weight loss was much less, for reasons unclear. The muSTING C205Y variant also was highly effective, although not curative.

| Murine STING | TGI vs. PBS, | Complete | Weight Loss Nadir |
|---|---|---|---|
| GOF Mutant | Day 29 | Response | and Day |
| muSTING C205Y | 79.4% | 0/5 | 2.6%, day 13 |
| muSTING N153S | 79.3% | 1/5 | 2.2%, day 13 |
| muSTING R283G | 85.1% | 1/5 | 1.8%, day 13 |

[1405] The STING-cured mice from these studies were re-challenged at day 40 post-initial tumor implantation on the opposite flank, SC with MC38 colorectal adenocarcinoma cells (5×10⁵ cells in 100 μL PBS). Compared to naïve mice (N=5), in which all tumors grew out, all of the STING-cured mice rejected the tumors, demonstrating the engagement of adaptive immunity.

[1406] These data validate the safety and potency of the murine versions of the human constitutively active STING variants in a murine model of colorectal carcinoma, and reveal a small subset of variants that have enhanced potency compared to the other STING variants. These highly active variants also elicit protective immunity, demonstrating the potency of tumor-specific production of type I interferon.

### Murine STING GOF Variants Demonstrate Significant Tumor Remodeling Following IV Dosing

[1407] It was next determined whether the bacterial strains containing plasmids encoding constitutively active STING variants demonstrate differences in their ability to remodel the tumor microenvironment (TME) following IV dosing. To test this, 6-8 week-old female C57BL/6 mice (5 mice per group) were inoculated SC in the right flank with MC38 colorectal adenocarcinoma cells (5×10⁵ cells in 100 μL PBS). Mice bearing established flank tumors were IV injected on day 8 with 5×10⁵ CFUs of strain YS1646Δasd/ΔFLG, containing a plasmid with EF-1α driving the expression of muSTING N153S, muSTING V154M, muSTING R280Q, muSTING V146L, muSTING R283G, or plasmid control, and compared to PBS vehicle control.

[1408] At day 28 post tumor implantation, tumors were excised for analysis. Tumors were cut into 2-3 mm pieces into gentleMACS™ C tubes (Miltenyi Biotec) filled with 2.5 mL enzyme mix (RPMI-1640+10% FBS with 1 mg/mL Collagenase IV and 20 μg/mL DNase I). The tumor pieces were dissociated using OctoMACS™ (Miltenyi Biotec) specific dissociation program (mouse implanted tumors), and the whole cell preparation was incubated with agitation for 45 minutes at 37° C. After 45 minutes of incubation, a second round of dissociation was performed using the OctoMACS™ (mouse implanted tumor) program, and the resulting single cell suspensions were filtered through a 70 μM nylon mesh into a 50 mL tube. The nylon mesh was washed once with 5 mL of RPMI-1640+10% FBS, and the cells were filtered a second time using a new 70 μM nylon mesh into a new 50 mL tube. The nylon mesh was washed with 5 mL of RPMI-1640 with 10% FBS, and the filtered cells were then centrifuged at 1000 RPM for 7 minutes. The resulting dissociated cells were resuspended in PBS and kept on ice before the staining process.

[1409] The percentage of live tumor-infiltrating leukocytes (TILs), including CD4⁺ Tregs, CD4⁺ Th1 cells, CD8⁺ T cells, neutrophils, monocytes, dendritic cells (DCs), M1 macrophages and M2 macrophages, following the administration of strain YS1646Δasd/ΔFLG, containing plasmids encoding the various GOF muSTING mutants, was determined by flow cytometry. For the flow-cytometry staining, 100 μL of the single cell suspensions were seeded in wells of a V-bottom 96-well plate. PBS containing a dead/live stain (Zombie Aqua™, BioLegend) and Fc Blocking reagents (BD Biosciences) were added at 100 μL per well, and incubated on ice for 30 minutes in the dark. After 30 minutes, the cells were washed twice with PBS+2% FBS by centrifugation at 1300 RPM for 3 minutes. The cells were then resuspended in PBS+2% FBS, containing fluorochrome-conjugated antibodies (CD4 FITC clone RM4-5; CD8a BV421 clone 53-6.7; F4/80 APC clone BM8; CD11b PE-Cy7 clone M1/70; CD45 BV570 clone 30-F11; CD3 PE clone 145-2C11; Ly6C BV785 clone HK1.4; I-A/I-E APC-Cy7 clone M5/114.15.2; Ly6G BV605 clone 1A8; and CD24 PercP-Cy5.5 clone M1/69; all from BioLegend), and incubated on ice for 30 minutes in the dark. After 30 minutes, the cells were washed twice with PBS+2% FBS by centrifugation at 1300 RPM for 3 minutes and resuspended in flow cytometry fixation buffer (Thermo Fisher Scientific). Flow cytometry data were acquired using the ACEA NovoCyte® flow cytometer (ACEA Biosciences, Inc.), and analyzed using the FlowJo™ software (Tree Star, Inc.).

[1410] As shown in the tables below, the YS1646Δasd/ΔFLG strain with the EF-1α plasmid control demonstrated predominantly high neutrophil infiltration, despite some CD8⁺ T-cell recruitment, likely due to immunostimulatory elements on the plasmid. In contrast, the different muSTING variants had unique tumor-infiltrating immune cell signatures, with some, such as muSTING V146L and muSTING R283G resulting in fewer immunosuppressive neutrophils than the PBS control. The most favorable immune profiles were observed in the tumors from mice that were administered the muSTING R283G and muSTING N153S mutants, with high numbers of CD4⁺ Th1 cells and CD8⁺ T-cells, and low numbers of neutrophils, which indicates highly favorable conditions for generating an adaptive immune response. In addition, the muSTING R283G and muSTING N153S mutants had significantly higher p15e tumor-antigen-specific CD8 T-cells in the tumor, as compared to PBS. These trends were also recapitulated in the total cell counts, as shown below. Thus, delivery of constitutively active STING variants to the tumor-resident myeloid cells leads to a complete remodeling of the immunosuppressive tumor microenvironment, towards an adaptive anti-tumor phenotype, and away from a bacterial phenotype, which is characterized by the promotion of innate immunity and the suppression of adaptive immunity.

### % of Live Tumor-Infiltrating Leukocytes TILs

| | muSTING GOF Mutants Encoded on Plasmids in IV-Administered YS1646Δasd/ΔFLG Strain | | | | | | |
|---|---|---|---|---|---|---|---|
| % Among | | Plasmid | muSTING | muSTING | muSTING | muSTING | muSTING |
| TILs | PBS | Control | N153S | V154M | R280Q | V146L | R283G |
| CD4⁺ Tregs | 2.9 ± 1.7 | 1.8 ± 0.5 | 3.3 ± 2.6 | 1.5± 0.5 | 2 ± 0.9 | 1.8 ± 0.5 | 1.5 ± 0.4 |
| CD4⁺ Th1 | 6.6 ± 3.2 | 13 ± 4.3 | 20.7 ± 10.4 | 13.2 ± 6.1 | 22.6 ± 7.4 | 19.5 ± 4.9 | 25.6 ± 7.8 |
| Cells | | | | | | | |
| CD8⁺ T | 16.2 ± 10.2 | 24.5 ± 11.6 | 25.8 ± 9.2 | 16.5 ± 4.4 | 20.2 ± 7.2 | 20.8 ± 3.6 | 27.8 ± 8.7 |
| Cells | | | | | | | |
| Neutrophils | 11.3 ± 14.2 | 30.6 ± 17.4 | 13.5 ± 12.4 | 21.4 ± 12.5 | 15.9 ± 11.6 | 9.1 ± 6.5 | 6.6 ± 5.9 |
| Monocytes | 16.6 ± 3.5 | 12.7 ± 2.7 | 13.7 ± 3.9 | 16.4 ± 5.4 | 15.8 ± 6.5 | 15.6 ± 2.2 | 13.5 ± 1.3 |
| DCs | 1.4 ± 0.4 | 0.5 ± 0.3 | 0.9 ± 0.7 | 0.4 ± 0.2 | 0.5 ± 0.3 | 0.5 ± 0.2 | 0.5 ± 0.3 |
| M1 Macro- | 10.2 ± 6.2 | 3.1 ± 2.1 | 4.6 ± 2.1 | 9.4 ± 5 | 5.6 ± 4.2 | 8.6 ± 3.7 | 5.4 ± 2 |
| phages | | | | | | | |
| M2 Macro- | 14.9 ± 10.6 | 4.6 ± 2.6 | 7.3 ± 3.1 | 11.6 ± 5.2 | 8.6 ± 6.3 | 12.8 ± 5 | 9.2 ± 4 |
| phages | | | | | | | |

| | muSTING GOF Mutants Encoded on Plasmids in IV-Administered YS1646Δasd/ΔFLG Strain | | | | | | |
|---|---|---|---|---|---|---|---|
| | | Plasmid | muSTING | muSTING | muSTING | muSTING | muSTING |
| | PBS | Control | N153S | V154M | R280Q | V146L | R283G |
| CD4⁺ Tregs | 437 ± 230 | 148 ± 102 | 530 ± 117 | 310 ± 114 | 520 ± 169 | 297 ± 207 | 438 ± 176 |
| CD4⁺ Th1 | 1108 ± 599 | 1059 ± 711 | 3765 ± 917 | 3349 ± 2869 | 5864 ± 1618 | 2961 ± 1800 | 7463 ± 3240 |
| Cells | | | | | | | |
| CD8⁺ T | 2948 ± 3119 | 1571 ± 601 | 6152 ± 3820 | 3898 ± 2823 | 5446 ± 2454 | 3266 ± 1277 | 7566 ± 1782 |
| Cells | | | | | | | |
| Neutrophils | 1531 ± 1604 | 2604 ± 1975 | 3699 ± 4400 | 4815 ± 3423 | 4301 ± 3502 | 1240 ± 1160 | 1698 ± 1485 |
| Monocytes | 2871 ± 1472 | 912 ± 369 | 3182 ± 1708 | 3350 ± 1183 | 4132 ± 1595 | 2524 ± 1420 | 3811 ± 996 |
| DCs | 233 ± 97 | 28 ± 18 | 161 ± 45 | 82 ± 31 | 130 ± 90 | 78 ± 48 | 135 ± 90 |
| M1 Macro- | 2163 ± 2025 | 227 ± 213 | 881 ± 316 | 1797 ± 750 | 1421 ± 910 | 1325 ± 856 | 1524 ± 658 |
| phages | | | | | | | |
| M2 Macro- | 3046 ± 2996 | 334 ± 275 | 1391 ± 373 | 2183 ± 608 | 2189 ± 1402 | 2043 ± 1237 | 2612 ± 1330 |
| phages | | | | | | | |

### Example 14

### Expression of Multiple Immunomodulatory Proteins using Combinatorial Plasmid Expression Cassettes

### Multi-Modular Plasmid Expression Cassettes Demonstrate the Ability to Produce Multiple Immunomodulatory Proteins in Human Cells

[1412] Combinations of nucleic acids, encoding GOF type I IFN inducing variants and cytokines, were cloned into the pATI-1.75 vector, using two separate ORFs, under the control of the CMV and EF-1α promoters (dual promoter system), or using T2A sequences within the ORFs and one promoter (single promoter system). The constructs also optionally included post-transcriptional regulatory elements (PREs), such as 3′ WPRE or HPRE, and/or polyadenylation signal sequences, such as the SV40 or bovine growth hormone (bGH) polyadenylation signals. The constructs prepared included those encoding the cytokines muIL-2, mu-IL-2 with codon optimization (muIL-2 CO), muIL-21, muIL-12p70, muIL-15Rα-IL-15sc, muIL-18, and muIFN-α2, and combinations thereof, the muSTING variant with the mutation R283G; and/or the murine co-stimulatory molecule 4-1BBL with a deletion of the cytoplasmic domain (mu4-1BBLΔcyt). The sequences were confirmed by PCR.

[1413] To determine whether the combination plasmids, containing GOF type I IFN inducing variants, can induce functional type I IFN in human cells, the plasmids were assessed using HEK293T STING Null Reporter cells (InvivoGen), which do not contain endogenous STING. These cells express secreted embryonic alkaline phosphatase (SEAP), placed under the control of the endogenous IFN-stimulated response element (ISRE) promoter, where the coding sequence of ISRE has been replaced by the SEAP ORF using knock-in technology. Type I interferon activity can be assessed by monitoring type I IFN-stimulated SEAP production in the cell culture supernatants. In addition, supernatants were collected and evaluated for relative cytokine concentrations by ELISA.

[1414] To test the relative production of type I IFN and co-expressed cytokines, 2×10⁵ 293T-Dual™ Null cells (InvivoGen) were plated one day prior on 24-well plates coated with poly-L-lysine, to achieve 80% confluency. On the day of transfection, 500 ng of plasmids encoding a panel of GOF variants, cytokines, and co-stimulatory molecules, alone, or in various combinations, were diluted in serum-free media and added to FuGENE® transfection reagent (Promega), at the proper reagent:DNA ratios. Cell culture supernatants from each sample were collected after overnight incubation, and 20 μL of the cell culture supernatants was added to 180 μL QUANTI-Blue™ reagent (InvivoGen). Type I interferon activation was determined by measuring ISRE-induced SEAP activity on a SpectraMax® M3 Spectrophotometer (Molecular Devices) at an absorbance wavelength of 650 nm. The muIL-2 constructs were evaluated for muIL-2 expression in a murine IL-2 ELISA (R&D Systems), according to the manufacturer's instructions. The muIL-12p70 constructs were evaluated in a murine IL-12 ELISA (R&D Systems), according to the manufacturer's recommendation. For the muIL-15Rα-IL-15sc constructs, the murine IL-15 ELISA (eBioscience) was used, per kit instructions. IFN-α2 was measured using the RAW-Lucia™ ISG reporter cell line (InvivoGen). Murine IL-18 and murine IL-21 were measured by ELISA (Invitrogen).

[1415] As shown in the table below, assays performed to detect the presence of secreted functional proteins demonstrated high expression of multiple combination payloads. These include cytokine combinations, as well as combinations with type I IFN inducing GOF variants, and/or with co-stimulatory payloads. These data validate the ability of the platform provided herein to express multiple immunomodulatory proteins from a single expression cassette.

| | Protein Expression | | | | | | | |
|---|---|---|---|---|---|---|---|---|
| | STING | IL-2 | IL-12 | | IL-15 | IFN-α2 | IL-21 | |
| | (Abs 650 | (Abs 650 | (Abs 650 | IL-15 | (Abs 650 | (Lumines- | (OD at | IL-18 |
| Construct | nm) | nm) | nm) | (pg/mL) | nm) | cence) | 450 nm) | (pg/mL) |
| CMV- | | 1.995 | | | | | | |
| muIL-2 | | | | | | | | |
| CMV- | | 2.0073 | | | | | | |
| muIL-2 CO- | | | | | | | | |
| WPRE | | | | | | | | |
| EF-1α- | | | | | | | 1.138 ± | |
| muIL-21 | | | | | | | 0.1853 | |
| CMV- | | | | | | | 0.4758 ± | |
| muIL-21 | | | | | | | 0.0461 | |
| EF-1α- | | | 0.9052 | | | | | |
| muIL-12p70 | | | | | | | | |
| CMV- | | | | 30140.8 ± | 0.8224 | | | |
| muIL-15Rα- | | | | 535.5 | | | | |
| IL-15sc- | | | | | | | | |
| WPRE | | | | | | | | |
| EF-1α- | | | | | | 14570 | | |
| muIFN-α2 | | | | | | | | |
| CMV- | | | | | | 18658 | | |
| muIFN-α2- | | | | | | | | |
| WPRE | | | | | | | | |
| CMV- | | 2.0998 | | | | 13066 | | |
| muIL-2 | | | | | | | | |
| CO_T2A_muIFN- | | | | | | | | |
| α2-WPRE | | | | | | | | |
| CMV- | | | | 29895.9 ± | 1.0125 | 8571 | | |
| muIL-15Rα- | | | | 630.9 | | | | |
| sc_T2A_muIFN- | | | | | | | | |
| α2-WPRE | | | | | | | | |
| CMV- | | 2.0589 | | | | 8297 | | |
| muIL-2 CO + | | | | | | | | |
| EF-1α- | | | | | | | | |
| muIFN-α2 | | | | | | | | |
| CMV- | | | | | | 8682 | 0.3797 ± | |
| muIL-21 + | | | | | | | 0.0830 | |
| EF-1α- | | | | | | | | |
| muIFN-a2 | | | | | | | | |
| CMV- | | 2.0085 | | | | | 0.7565 ± | |
| muIL-2 CO + | | | | | | | 0.1271 | |
| EF-1α- | | | | | | | | |
| muIL-21 | | | | | | | | |
| CMV- | | | | 12605 ± | 0.2362 | | 0.2963 ± | |
| muIL-15Rα- | | | | 278.6 | | | 0.0155 | |
| IL-15sc + | | | | | | | | |
| EF-1α- | | | | | | | | |
| muIL-21 | | | | | | | | |
| CMV- | | | 1.0893 | | | | 0.1479 ± | |
| muIL-12p70 + | | | | | | | 0.001 | |
| EF-1α- | | | | | | | | |
| muIL-21 | | | | | | | | |
| CMV- | | 1.207 ± | | | | | | |
| muIL-2 CO- | | 0.121 | | | | | | |
| HPRE- | | | | | | | | |
| bGHpoly(A) | | | | | | | | |
| EF-1α- | 0.4874 ± | | | | | | | |
| muSTING | 0.0045 | | | | | | | |
| R283G | | | | | | | | |
| CMV- | 0.4866 ± | | | | | | | |
| muSTING | 0.0511 | | | | | | | |
| R283G- | | | | | | | | |
| WPRE | | | | | | | | |
| CMV- | | 0.9971 ± | 0.3303 ± | | | | | |
| muIL-2 CO + | | 0.0104 | 0.0157 | | | | | |
| EF-1α- | | | | | | | | |
| muIL-12p70 | | | | | | | | |
| CMV- | | | 0.3629 ± | | 0.1464 ± | | | |
| muIL-15Rα- | | | 0.0242 | | 0.0034 | | | |
| IL-15sc + | | | | | | | | |
| EF-1α- | | | | | | | | |
| muIL-12p70 | | | | | | | | |
| CMV- | 0.7096 ± | | | | | | | 5991.4 ± |
| muIL-18 + | 0.0169 | | | | | | | 1642.0 |
| EF-1α- | | | | | | | | |
| muSTING | | | | | | | | |
| R283G- | | | | | | | | |
| WPRE | | | | | | | | |
| CMV- | | | 0.6538 ± | | | 577.3 ± | | 12685.0 ± |
| muIL- | | | 0.0205 | | | 122.5 | | 4402.8 |
| 12p70 | | | | | | | | |
| T2A_muIFN- | | | | | | | | |
| α2 + | | | | | | | | |
| EF-1α-IL- | | | | | | | | |
| 18-WPRE | | | | | | | | |
| CMV- | 0.454 ± | | 0.4581 ± | | | | | 3805.8 ± |
| muIL- | 0.123 | | 0.0158 | | | | | 1369.5 |
| 12p70 | | | | | | | | |
| T2A_muSTING | | | | | | | | |
| R283G + | | | | | | | | |
| EF-1α- | | | | | | | | |
| muIL-18- | | | | | | | | |
| WPRE | | | | | | | | |
| CMV- | 0.5867 ± | | | | 0.2326 ± | | | 3626 ± |
| muIL-15Rα- | 0.0333 | | | | 0.0049 | | | 1248 |
| IL-15sc | | | | | | | | |
| T2A_muSTI | | | | | | | | |
| NG R283G + | | | | | | | | |
| EF-1α- | | | | | | | | |
| muIL-18- | | | | | | | | |
| WPRE | | | | | | | | |
| CMV- | | | | | 0.3512 ± | 1802 ± | | 6872 ± |
| muIL-15Rα- | | | | | 0.0172 | 216.5 | | 1671 |
| IL-15sc | | | | | | | | |
| T2A_muIF | | | | | | | | |
| N-α2 + | | | | | | | | |
| EF-1α-muIL- | | | | | | | | |
| 18-WPRE | | | | | | | | |
| CMV-4- | 0.2525 ± | | | | | | | |
| 1BBL(Δcyt) + | 0.0144 | | | | | | | |
| EF-1α- | | | | | | | | |
| muSTING | | | | | | | | |
| R283G- | | | | | | | | |
| WPRE | | | | | | | | |

Constitutively Active Type I IFN Inducing Variants have Unique Cytokine and Chemokine Profiles

[1416] Supernatants harvested from HEK293T transfection experiments with a panel of human type I IFN inducing GOF variants, tested as described above, were evaluated for downstream signaling differences using a human anti-viral CBA panel (BD Biosciences), according to the manufacturer's protocol. Each transfection was performed in duplicate, and cytokine levels were measured. The average of two measurements was calculated. Fold increase in average cytokine secretion was calculated compared to untransfected wells, in which the average cytokine secretion was set as 1.00.

[1417] As shown in the table below, low levels of human IL-12p70 were produced in the cells. However, several human type I IFN inducing GOF variants induced the production of type I IFN-α2 and/or IFN-03, including the phosphomimetic IRF3 variant (huIRF3 S396D)), as well as several constitutively active STING variants. A number of these GOF variants produced high levels of secreted CXCL10, demonstrating the ability of these expressed variants to recruit T-cells into the tumor microenvironment. The highest levels of CXCL10 expression were observed following the expression of the huSTING variant with the mutation R284G.

[1418] These data validate the use of multiplexed plasmid expression constructs, containing type I IFN inducing GOF variants, for induction of functional downstream cytokines and chemokines, such as CXCL10/IP-10. These variants all have unique signatures, and STING GOF variants induced the highest levels of CXCL1 secretion, particularly huSTING R284G (corresponding to muSTINGR283G).

| | Secreted Immunostimulatory | | | |
|---|---|---|---|---|
| | Cytokines and Chemokines | | | |
| | (Fold Relative to Untransfected) | | | |
| Constructs | IL-12p70 | IFN-α2 | IFN-β | CXCL10 |
| Untransfected control | 1.00 | 1.00 | 1.00 | 1.00 |
| EF-1α-mCherry Control | 1.50 | 1.59 | 1.50 | 2.05 |
| EF-1α-huSTING Negative | 1.32 | 2.10 | 1.43 | 2.16 |
| Control | | | | |
| EF-1α-huSTING WT | 1.66 | 1.69 | 1.46 | 2.77 |
| EF-1α-huSTING-V147L | 1.78 | 2.35 | 21.35 | 332.14 |
| EF-1α-huSTING-N154S | 1.52 | 2.23 | 23.37 | 398.99 |
| EF-1α-huSTING-V155M | 2.00 | 2.09 | 6.02 | 121.38 |
| EF-1α-huSTING-C206Y | 1.39 | 2.02 | 16.51 | 218.38 |
| EF-1α-huSTING-R281Q | 1.35 | 1.35 | 8.17 | 301.18 |
| EF-1α-huSTING-R284G | 1.46 | 2.14 | 13.41 | 429.40 |
| EF-1α-huIRF3-WT | 1.50 | 1.49 | 1.50 | 1.11 |
| EF-1α-huIRF3-S396D | 1.93 | 9.37 | 38.06 | 65.89 |
| CMV-muIFN-α2-WPRE | 1.03 | 3.63 | 1.37 | 146.49 |
| CMV-muIL-2 CO_T2A_ | 1.03 | 1.63 | 1.37 | 86.02 |
| muIFN-α2-WPRE | | | | |
| CMV-muIL-15Rα-IL-15sc_ | 1.03 | 0.80 | 1.37 | 40.85 |
| T2A_muIFN-α2-WPRE | | | | |

### Immune Cell Co-Culture Assays Identify Optimal Combinations of Immunomodulatory Targets

[1419] In order to determine the optimal combinations of cytokines to elicit T-cell recruitment and activation, a panel was tested in a macrophage and T-cell co-culture assay. Golden ticket (STING deficient) murine primary bone marrow-derived macrophages (BMMs) were generated as described above (see, Example 6), using a 24-well plate. Each well was transfected with the appropriate DNA constructs using FuGENE® transfection reagents (Promega). The constructs included those encoding muIL-2 CO, muIL-12p70, muSTING-R283G, muIL-2 CO+muIL-12p70, mu1L-15Rα-IL-15sc+muIL-12p70, and muIL-12p70+muSTING-R283G+muIL-18.

[1420] 24 hours post-transfection, 100 μL of cell culture supernatants were harvested from the wells for a flow cytometry-based cytokine bead array (CBA). In parallel, two spleens from C57BL/6 mice were dissected, and splenic CD4⁺ and CD8⁺ T-cells were isolated following instructions from a mouse T-cell isolation kit (StemCell Technologies). 200,000 isolated T-cells per well were then added to the transfected cells, with or without CD3ε antibody (clone 145-2C11, BioLegend), at a final concentration of 0.5 μg/ml per well. At 24 and 48 hours post-addition of T-cells to the transfected cells, 100 μL of the co-culture supernatants were harvested from the wells for a flow-cytometry based cytokine bead array. Supernatants from transfected bone marrow macrophages (BMMs) and bone marrow macrophage/T-cell co-cultures were analyzed for their cytokine content, using murine anti-viral and murine Th1 specific cytokine bead arrays, respectively.

[1421] As shown in the table below, only the plasmids encoding muSTING-R283G elicited CXCL10 production from the macrophages, while plasmids encoding muIL-12p70, alone or in combination with other proteins, elicited the highest levels of IFNγ from the co-cultured T-cells, which were greater than the background amount resulting from CD3ε stimulation. The combination of muIL-12p70+muIL-18+muSTING-R283G was able to induce both CXCL10 production from macrophages, and IFNγ production from co-cultured T-cells.

[1422] These data demonstrate the feasibility of expressing multiple immunomodulatory payloads from a single plasmid, as well as the synergistic activities of these combinations.

| | CXCL10 | IFNγ |
|---|---|---|
| | Production | Production |
| | by BMMs | By T-Cells |
| Constructs | (pg/mL) | (pg/mL) |
| Untransfected | 3.82 | 3170.28 |
| CMV-muIL-2 CO-WPRE | 5.92 | 7633.19 |
| EF-1α-muIL-12p70 | 12.24 | 11495.65 |
| CMV-muSTING-R283G | 662.03 | 1060.82 |
| CMV-muIL-2 CO + EF-1α-muIL-12p70 | 4.59 | 8511.19 |
| CMV-muIL-15Rα-IL-15sc + EF-1α- | 5.82 | 11694.78 |
| muIL-12p70 | | |
| CMV-muIL-12p70_T2A_muSTING- | 324.92 | 9331.51 |
| R283G + EF-1α-muIL-18 | | |

### Combinatorial Immunotherapy Demonstrates Enhanced Anti-Tumor Activity in a Murine Model of Colorectal Adenocarcinoma

[1423] In order to determine whether tumor-specific delivery of a combination of cytokines enhances anti-tumor efficacy, a construct encoding the combination of muIL-12p70, muIL-18, and muSTING-R283G (CMV-muIL-12p70_T2A_muIL-18+EF-1α-muSTING-R283G-WPRE), was assessed in the MC38 murine model of colorectal adenocarcinoma. For this study, 6-8 week-old female C57BL/6 mice (5 mice per group) were inoculated SC in the right flank with MC38 colorectal adenocarcinoma cells (5×10⁵ cells in 100 μL PBS). Mice bearing established flank tumors were IV injected on day 10 with 1×10⁷ CFUs of strain YS1646Δasd/ΔFLG/ΔpagP/ΔansB, containing a plasmid encoding the combination of muIL-12p70, muIL-18, and muSTING-R283G (CMV-muIL-12p70_T2A_muIL-18+EF-1α-muSTING-R283G-WPRE), or with PBS vehicle control.

[1424] The combination therapy was very well tolerated, with only an initial weight loss of 3.6% that had fully recovered 3 days later. This is in marked contrast to the toxicities observed with systemic administration of these cytokines (IL-12p70 and IL-18). Compared to PBS control, the combination therapy was highly effective and curative (92.3% TGI, 60% cure rate, day 30). These data demonstrate the potency and safety of delivering combinations of cytokines in a tumor-specific manner, using the immunostimulatory bacterial strains described herein.

### Example 15

### Protein Engineering Screening to Identify Improved Gain-of-Function Mutations in STING, RIG-I, MDA5, IRF3, IRF7, and other Interferon Pathway Genes

[1425] Gain-of-function (GOF) amino acid mutants that are constitutively active and that promote interferonopathies are identified from humans. Many GOF mutations occur due to single base pair nucleotide changes that alter the amino acid codon at that particular position in the gene. For example, in STING, the V147L mutation occurs due to a mutation at c.439G→C; N154S occurs due to a mutation at c.461A→G; and V155M occurs due to a mutation at c.463G→A. The purpose of the screening was to identify constitutively active mutants that lead to high levels of type I interferon expression. Designed mutations, at sites known to promote interferonopathies when mutated in human patients, allow for a greater number of amino acid substitutions to be tested. In this example, site-directed mutagenesis with designed amino acids is performed at the positions of known mutations (see, Table below, listing mutations in genes that promote interferonopathies), to identify mutations with enhanced activity, that lead to high level type I interferon expression.

| Exemplary Normal Function Proteins | |
|---|---|
| in which the Mutations are Introduced | Gain-of-Function Mutations |
| STING/TMEM173 | S102P |
| (SEQ ID NOs: 305-309) | V147L |
| | V147M |
| | N154S |
| | V155M |
| | G166E |
| | C206Y |
| | G207E |
| | S102P/F279L |
| | F279L |
| | R281Q |
| | R284G |
| | R284S |
| | R284M |
| | R284K |
| | R284T |
| | R197A |
| | D205A |
| | R310A |
| | R293A |
| | T294A |
| | E296A |
| | R197A/D205A |
| | S272A/Q273A |
| | R310A/E316A |
| | E316A |
| | E316N |
| | E316Q |
| | S272A |
| | R375A |
| | R293A/T294A/E296A |
| | D231A |
| | R232A |
| | K236A |
| | Q273A |
| | S358A/E360A/S366A |
| | D231A/R232A/K236A/R238A |
| | S358A |
| | E360A |
| | S366A |
| | R238A |
| | S324A/S326A |
| MDA5/IFIH1 | T331I |
| (SEQ ID NO: 310) | T331R |
| | A489T |
| | R822Q |
| | G821S |
| | A946T |
| | R337G |
| | D393V |
| | G495R |
| | R720Q |
| | R779H |
| | R779C |
| | L372F |
| | A452T |
| RIG-I | E373A |
| (SEQ ID NO: 311) | C268F |

Amino acid residues R197, D205, R310, R293, T294, E296, S272, Q273, E316, D231, R232, K236, S358, E360, S366, and R238, with reference to the sequence of human STING, as set forth in SEQ ID NOs:305-309, correspond to amino acid residues R196, D204, R309, R292, T293, E295, S271, Q272, E315, D230, R231, K235, S357, E359, S365, and R237, respectively, with reference to the sequence of murine STING, as set forth in SEQ ID NO:369.

[1426] PCR primers are generated with designed substitutions flanked on the 5′ and 3′ ends with homologous cDNA sequences from the gene. The QuikChange® Site-Directed Mutagenesis kit (Agilent), or another comparable commercially available kit, is used to generate a PCR product incorporating the designed mutation. PCR amplified plasmids are treated with DpnI, then electroporated into competent E. coli cells. Individual clones are isolated, plasmid mini-preps are performed, and the sequence identity of the desired mutation is confirmed. Larger scale plasmid preparations are then performed (using a Qiagen Kit), and the DNA is transfected into HEK293T STING Reporter cells (InvivoGen), which do not contain endogenous STING. These cells express Lucia™ luciferase, a secreted luciferase, placed under the control of the endogenous IFN-β promoter; the coding sequence of IFN-β has been replaced by the Lucia™ luciferase ORF using knock-in technology. Constitutively activate mutants then are identified and ranked by measurement of IFN-β promoter induced expression of luciferase activity.

### Example 16

### Various Species of Immunostimulatory Bacteria with Inactivating Deletions Corresponding to the Deletions in Salmonella typhimurium

[1427] The Examples above describe exemplary modifications to the genome of Salmonella typhimurium to increase targeting to and accumulation of Salmonella typhimurium in immune-resident myeloid cells and in the tumor microenvironment, to deliver therapeutic products/payloads to tumors, and to reduce toxicity of the bacteria by eliminating their ability to infect other cell types. These genetic modifications similarly can be introduced into other bacterial strains and species, such as by deletion of the corresponding genes in other species, as described below.

Escherichia coli

[1428] In-frame chromosomal deletions of the lpxM, purM, asd, fliC, fliE, pagP, ansB and csgD genes are made sequentially in E. coli strains using a technique based on the recombineering methods described by Datsenko and Wanner (Proc. Natl. Acad. Sci. U.S.A. 97:6640-6645 (2000)). The genes in E. coli are as follows:
[1429] 1) lpxM, encoding myristoyl-acyl carrier protein-dependent acyltransferase [E. coli strain K-12, substrain MG1655; NCBI Gene ID: 945143];
[1430] 2) purM, encoding phosphoribosylformylglycinamide cyclo-ligase [E. coli strain K-12, substrain MG1655; NCBI Gene ID: 946975];
[1431] 3) asd, encoding aspartate-semialdehyde dehydrogenase [E. coli strain K-12, substrain MG1655; NCBI Gene ID: 947939];
[1432] 4) fliC, encoding flagellar filament structural protein [E. coli strain K-12, substrain MG1655; NCBI Gene ID: 949101];
[1433] 5) fliE, encoding flagellar basal-body protein FliE [E. coli strain K-12, substrain MG1655; NCBI Gene ID: 946446];
[1434] 6) pagP, encoding Lipid IVA palmitoyltransferase [E. coli strain K-12, substrain MG1655; NCBI Gene ID: 946360];
[1435] 7) ansB, encoding L-asparaginase 2 [E. coli strain K-12, substrain MG1655; NCBI Gene ID: 947454];
[1436] 8) csgD, encoding DNA-binding transcriptional dual regulator CsgD [E. coli strain K-12, substrain MG1655; NCBI Gene ID: 949119]; and
[1437] 9) rpsM, encoding 30S ribosomal subunit protein S13 (promoter) [E. coli strain K-12, substrain MG1655; NCBI Gene ID: 947791].

[1438] Briefly, a specific chromosomal sequence is replaced with a selectable antibiotic resistance marker flanked by homology arms, and is subsequently removed by a cre/loxP system. The 5′ and 3′ flanking sequences of each target gene are identified and cloned into a plasmid vector on opposing sides of an antibiotic resistance gene. The gene deletion cassette, containing the antibiotic resistance gene and flanking 5′ and 3′ homology arms is PCR amplified, gel purified, and introduced into the E. coli strain by electroporation. Electroporated cells are recovered, and transformants are selected for on antibiotic plates. The antibiotic marker is then cured using a cre/loxP recombination system, in which antibiotic resistant clones are transformed with a cre-expressing temperature-dependent plasmid. Colonies are selected at 30° C. and subsequently eliminated by serial passage at 42° C., and then screened for loss of antibiotic resistance. Antibiotic sensitive clones are confirmed for gene deletion by colony PCR and sequence analysis.

Increasing Resistance or Rendering E. coli Resistant to Human Complement

[1439] Expression of the Salmonella typhimurium rck (resistance to complement killing) gene, the Yersinia enterocolitica homolog all (attachment invasion locus), or the Salmonella typhimurium pgtE (outer membrane serine protease) gene, in the E. coli ΔlpxM/ΔpurM/Δasd/ΔfliC/ΔfliE/ΔpagP/ΔansB/ΔcsgD strain is achieved by encoding the rck, all, or pgtE gene sequence downstream from a constitutive promoter, such as E. coli or S. typhimurium rpsM, on a plasmid (asd complementation system compatible), or by insertion on the bacterial chromosome (at any of the lpxM, purM, asd, fliC, fliE, pagP, ansB, or csgD loci).

Salmonella typhi

[1440] In-frame chromosomal deletions of the msbB, purM, asd, fliC, flgB, pagP, ansB, and csgD genes are made sequentially in S. typhi strains using the technique described above for E. coli-based strains.

[1441] Expression of the Salmonella typhimurium rck (resistance to complement killing) gene, the Yersinia enterocolitica homolog all, or the Salmonella typhimurium pgtE gene, in the S. typhi ΔmsbB/ΔpurM/Δasd/ΔfliC/ΔflgB/ΔpagP/ΔansB/ΔcsgD strain is achieved by encoding the rck, all, or pgtE gene sequence downstream of a constitutive promoter, such as S. typhimurium or S. typhi rpsM, on a plasmid (asd complementation system compatible), or by insertion on the bacterial chromosome (at any of the msbB, purM, asd, fliC, flgB, pagP, ansB, or csgD loci). The genes in S. typhi are as follows:
[1442] 1) msbB (STY2097), encoding lipid A acyltransferase [Salmonella enterica subspecies enterica serovar Typhi, strain CT18; NCBI Gene ID: 1248440];
[1443] 2) purM (STY2740), encoding phosphoribosylformylglycinamidine cyclo-ligase [Salmonella enterica subspecies enterica serovar Typhi, strain CT18; NCBI Gene ID: 1249054];
[1444] 3) asd (STY4271), encoding aspartate-semialdehyde dehydrogenase [Salmonella enterica subspecies enterica serovar Typhi, strain CT18; NCBI Gene ID: 1250488];
[1445] 4) fliC (STY2167), encoding flagellin [Salmonella enterica subspecies enterica serovar Typhi, strain CT18; NCBI Gene ID: 1248507];
[1446] 5) flgB (STY1213), encoding flagellar basal-body rod protein FlgB [Salmonella enterica subspecies enterica serovar Typhi, strain CT18; NCBI Gene ID: 1247617];
[1447] 6) pagP (STY0677), encoding antimicrobial peptide resistance and lipid A acylation protein [Salmonella enterica subspecies enterica serovar Typhi, strain CT18; NCBI Gene ID: 1247137];
[1448] 7) ansB (STY3259), encoding L-asparaginase [Salmonella enterica subspecies enterica serovar Typhi, strain CT18; NCBI Gene ID: 1249541];
[1449] 8) csgD (STY1179), encoding regulatory protein CsgD [Salmonella enterica subspecies enterica serovar Typhi, strain CT18; NCBI Gene ID: 1247585]; and
[1450] 9) rpsM (STY4380), encoding 30S ribosomal subunit protein S13 (promoter) [Salmonella enterica subspecies enterica serovar Typhi, strain CT18; NCBI Gene ID: 1250594].

### Listeria Monocytogenes

[1451] In-frame chromosomal deletions of the purA, purQ, purS, asd, flaA, fliC, flgB, and ansB genes in Listeria monocytogenes is achieved by an allelic exchange technique using a temperature-sensitive shuttle vector, such as pKSV7, that confers antibiotic resistance and allows replication at low temperatures (30° C.), but is unable to replicate at higher temperature (43° C.). The 5′ and 3′ flanking sequences of each target gene are identified and cloned in tandem into the pKSV7 vector, which is transformed into recipient Listeria monocytogenes and selected for by plating on agar plates with antibiotic. Chromosomal integration of the plasmid is induced by serial passage of antibiotic-resistant transformants at 42° C. under selection. Subsequent sequential subculturing of the strain at 30° C. results in subpopulations of cells in which the plasmids are excised through a second crossover event, producing reversions to the original wild-type gene, or incorporation of the 5′ and 3′ flanking sequence homology arms to generate the targeted deletion mutant. Antibiotic sensitive clones are screened at this step by colony PCR and sequence analysis.

[1452] To increase complement resistance, expression of the Salmonella typhimurium rck (resistance to complement killing) gene, the Yersinia enterocolitica homolog ail, or the Salmonella typhimurium pgtE gene in the Listeria monocytogenes ΔpurA/ΔpurQ/ΔpurS/Δasd/ΔflaA/ΔfliC/ΔflgB/ΔansB strain is achieved by encoding the rck, ail, or pgtE gene sequence downstream of a constitutive promoter, such as P_{hyper} or Pₕₑₗₚₑᵣ, on a plasmid (asd complementation system compatible), or by insertion on the bacterial chromosome (at any of the purA, purQ, purS, asd, flaA, fliC, flgB, or ansB loci). The genes in L. monocytogenes are as follows:
[1453] 1) purA (lmo0055), encoding adenylosuccinate synthetase [Listeria monocytogenes strain EGD-e; NCBI Gene ID: 986069];
[1454] 2) purQ (lmo1769), encoding phosphoribosylformylglycinamidine synthase II [Listeria monocytogenes strain EGD-e; NCBI Gene ID: 985972];
[1455] 3) purS (mo1771), encoding phosphoribosylformylglycinamidine synthase subunit PurS [Listeria monocytogenes strain EGD-e; NCBI Gene ID: 985970];
[1456] 4) asd (mo1437), encoding aspartate-semialdehyde dehydrogenase [Listeria monocytogenes strain EGD-e; NCBI Gene ID: 986492];
[1457] 5) flaA (lmo0690), encoding flagellin [Listeria monocytogenes strain EGD-e; NCBI Gene ID: 987167];
[1458] 6) fliE (lmo0712), encoding flagellar hook-basal body protein FliE [Listeria monocytogenes strain EGD-e; NCBI Gene ID: 985062];
[1459] 7) flgB (lmo0710), encoding flagellar basal-body rod protein FlgB [Listeria monocytogenes strain EGD-e; NCBI Gene ID 985059]; and
[1460] 8) ansB (lmo1663), encoding asparagine synthetase [Listeria monocytogenes strain EGD-e; NCBI Gene ID: 985663].

[1461] The genes msbB and pagP are absent in Listeria monocytogenes, which is a Gram-positive bacterium. CsgD also is absent in Listeria monocytogenes. Instead, Listeria express lcp, encoding the Listeria cellulose binding protein that is involved in biofilm formation, which also can be deleted.

Bifidobacterium longum

[1462] In-frame chromosomal deletions of BL1122 (purM), BL0492 (asd) and BL1142 (encoding an L-asparaginase precursor) in Bifidobacterium longum is achieved by an allelic exchange technique using an incompatible plasmid vector system, in which a conditional-replication vector, such as pBS423-ΔrepA, which lacks the plasmid replication gene, repA, is initially integrated into the genome, providing antibiotic resistance. A second plasmid, such as pTBR101-CM, encoding the repA gene, is subsequently transformed and facilitates a second crossover event that selects for excision of the initial integrant. The 5′ and 3′ flanking sequences of each target gene are identified and cloned in tandem into the conditional replication vector, lacking repA, and transformed into the Bifidobacterium longum ΔBL1122/ΔBL0492/ΔBL1142 strain. Crossover recombination events can occur at homology arm sequences, and successful plasmid integrants are selected for and isolated on antibiotic plates. Integrants are then transformed with an incompatible plasmid encoding a functional copy of repA, which facilitates a second crossover event and excision of the repA deficient plasmid, which is subsequently lost due to plasmid incompatibility. Genomic deletions are confirmed by colony PCR and sequence analysis, and the remaining plasmid is cured by removing selection and subsequent Rif treatment.

[1463] Expression of the Salmonella typhimurium rck (resistance to complement killing) gene, the Yersinia enterocolitica homolog all, or the Salmonella typhimurium pgtE gene in the Bifidobacterium longum ΔBL1122/ΔBL0492/ΔBL1142 strain is achieved by encoding the rck, ail, or pgtE gene sequence downstream of a strong constitutive promoter, such as P_{gap}, on a plasmid (asd complementation system compatible), or by insertion on the bacterial chromosome (at any of the BL1122, BL0492, or BL1142 loci). The Bifidobacterium longum genes are as follows:
[1464] 1) purM (BL1122), encoding phosphoribosylformylglycinamidine cyclo-ligase [Bifidobacterium longum strain NCC2705; NCBI Gene ID: 1022669];
[1465] 2) asd (BL0492), encoding aspartate-semialdehyde dehydrogenase [Bifidobacterium longum strain NCC2705; NCBI Gene ID: 1023089];
[1466] 3) BL1142, encoding an L-asparaginase precursor (Ntn_Asparaginase_2_like; L-Asparaginase type 2-like enzymes of the NTN-hydrolase superfamily) [Bifidobacterium longum strain NCC2705; NCBI Gene ID: 1023120]; and
[1467] 4) BL1363 gap (promoter) [Bifidobacterium longum strain NCC2705; NCBI Gene ID: 1022828].

[1468] Bifidobacterium longum are non-motile and lack flagellin, and are Gram-positive and lack msbB and pagP. The ansB gene is present, but encodes aspartate ammonia-lyase, which catalyzes the formation of fumarate from aspartate (aspA/ansB) [BL0338, Bifidobacterium longum strain NCC2705; NCBI Gene ID: 1023259].

Clostridium novyi

[1469] In-frame chromosomal deletions of NT01CX_RS09765, NT01CX_RS07625, and NT01CX_RS04325 (asd); the flagellin genes NT01CX_RS04995, NT01CX_RS04990, NT01CX_RS05070, and NT01CX_RS05075; and the flagellar basal body rod protein genes NT01CX_RS05080 (flgB), NT01CX_RS05085 (flgC), and NT01CX_RS05215 (flgG) in Clostridium is achieved by an allelic exchange technique requiring a counter-selection method including toxin-antitoxin systems, which requires an inducible promoter and toxic gene, such as the E. coli mRNA interferase mazF. The 5′ and 3′ flanking sequences of each target gene are identified and cloned in a configuration on opposing sides of a frt-flanked antibiotic resistance cassette in an allelic exchange counter-selection-containing vector, and transformed into Clostridium novyi. The mazF gene is encoded under the control of an inducible lac promoter on the allelic exchange vector, and permits selection of a double crossover event by growth on lactose-supplemented agar plates. Genomic deletions are confirmed by colony PCR and sequence analysis. Flp-frt recombination can then be used to cure the antibiotic resistance cassette from the chromosome.

[1470] Expression of the Salmonella typhimurium rck (resistance to complement killing) gene, the Yersinia enterocolitica homolog all, or the Salmonella typhimurium pgtE gene in the Clostridium novyi ΔNT01CX_RS09765/ΔNT01CX_RS07625/ΔNT01CX_RS04325/ΔNT01CX_RS04995/ΔNT01CX_RS04990/ΔNT01CX_RS05070/ΔNT01CX_RS05075/ΔNT01CX_RS05080/ΔNT01CX_RS050 85/ΔNT01CX_RS05215 strain is achieved by encoding the rck, ail, or pgtE gene sequence downstream from a strong constitutive promoter, such as Pₜₕₗ, P_{ptb}, or other variants, on a plasmid (asd complementation system compatible), or by insertion on the bacterial chromosome (at any of the NT01CX_RS09765, NT01CX_RS07625, NT01CX_RS04325, NT01CX_RS04995, NT01CX_RS04990, NT01CX_RS05070, NT01CX_RS05075, NT01CX_RS05080, NT01CX_RS05085, or NT01CX_RS05215 loci). The Clostridium novyi genes are as follows:
[1471] 1) NT01CX_RS09765, encoding AIR synthase [Clostridium novyi strain NT; NCBI Gene ID: 4541583];
[1472] 2) NT01CX_RS07625, encoding phosphoribosylformylglycinamidine cyclo-ligase [Clostridium novyi strain NT; NCBI Gene ID: 4540669];
[1473] 3) NT01CX_RS04325 (asd), encoding aspartate-semialdehyde dehydrogenase [Clostridium novyi strain NT; NCBI Gene ID: 4541762];
[1474] 4) NT01CX_RS04995, encoding flagellin [Clostridium novyi strain NT; NCBI Gene ID: 4541703];
[1475] 5) NT01CX_RS04990, encoding flagellin [Clostridium novyi strain NT; NCBI Gene ID: 4539984];
[1476] 6) NT01CX_RS05070, encoding flagellin [Clostridium novyi NT; NCBI Gene ID: 4539886];
[1477] 7) NT01CX_RS05075, encoding flagellin [Clostridium novyi NT; NCBI Gene ID: 4539699];
[1478] 8) NT01CX_RS05080 (flgB), encoding flagellar basal body rod protein FlgB [Clostridium novyi strain NT; NCBI Gene ID: 4540637];
[1479] 9) NT01CX_RS05085 (flgC), encoding flagellar basal body rod protein FlgC [Clostridium novyi strain NT; NCBI Gene ID: 4540143]; and
[1480] 10) NT01CX_RS05215 (flgG), encoding flagellar basal body rod protein FlgG [Clostridium novyi strain NT; NCBI Gene ID: 4540245]. Clostridium novyi is Gram-positive, and lacks msbB and pagP.

### Example 17

### Immunostimulatory Bacteria Modified to Express Vertebrate STING Variants that Induce Stronger Type I IFN Signaling and/or Weaker NF-κB Signaling than Human STING

[1481] STING signaling activates two signaling pathways. The first is the TANK binding kinase 1 (TBK1)/IRF3 axis, resulting in the induction of type I IFNs, and the activation of dendritic cells (DCs) and cross-presentation of tumor antigens to activate CD8⁺ T-cell mediated anti-tumor immunity. The second is the nuclear factor kappa-light-chain-enhancer of activated B-cell (NF-κB) signaling axis, resulting in a pro-inflammatory response, but not in the activation of the DCs and CD8⁺ T-cells that are required for anti-tumor immunity. Bacterially-based cancer immunotherapies are limited in their ability to induce type I IFN to recruit and activate the CD8⁺ T-cells that are necessary to promote tumor antigen cross-presentation and durable anti-tumor immunity. Hence, provided are immunostimulatory bacteria herein that induce and/or increase type I IFN signaling, and that have decreased NF-κB signaling, thereby increasing the induction of CD8⁺ T-cell mediated anti-tumor immunity, and enhancing the therapeutic efficacy of the bacteria. The immunostimulatory bacteria described above encode modified STING proteins that are gain-of-function mutants of STING that can increase induction of type I IFN compared to wild-type STING, or render the expression of type I IFN constitutive. In this example (and also described in the detailed description), the STING protein is modified to reduce or eliminate NF-κB signaling activity, and to retain the ability to induce type I IFN, and/or is modified for increased or constitutive type I IFN expression. This results in immunostimulatory bacteria that induce anti-tumor immunity, and do not induce (or induce less) NF-κB signaling that normally results from infection by bacterial pathogens.

[1482] STING proteins from different species exhibit different levels of type I IFN and NF-κB signaling activities. For example, STING signaling in human and mouse cells results in a strong type I IFN response, and a weak pro-inflammatory NF-κB response. STING signaling in ray-finned fish, such as salmon and zebrafish, in comparison, elicits robust activation of a primarily NF-κB-driven response, that is more than 100-fold higher compared with the IRF3-driven (i.e., type I IFN inducing) response. In other species, such as Tasmanian devil, STING signaling results in a type I IFN response, but essentially no NF-κB response. The immunostimulatory bacteria provided herein encode STING from non-human species, such as Tasmanian devil STING, in order to exploit the ability of STING to induce a type I IFN response, but without the concomitant induction of an NF-κB response. As described herein, these non-human STING proteins also are modified by mutation to increase the type I IFN response, or to render it constitutive. The identified mutations that have this effect in human STING are introduced into the non-human STING proteins. The corresponding residues are identified by alignment.

[1483] Also provided are chimeras in which the C-terminal tail (CTT) of STING is replaced in one species, such as human, with the CTT from a second (e.g., non-human) species STING protein that exhibits little or no NF-κB signaling activity. The CTT is an unstructured stretch of approximately 40 amino acids that contains sequence motifs required for STING phosphorylation and recruitment of IRF3. It can shape downstream immunity by altering the balance between type I IFN and NF-κB signaling. This is controlled through independent modules in the CTT, including IRF3-, TBK1-, and TRAF6-binding modules. For example, human STING residue S366 (see, e.g., SEQ ID NOs:305-309) is a primary TBK1 phosphorylation site that is part of an LxIS motif in the CTT, which is required for IRF3 binding, while a second PxPLR motif, including residue L374, is required for TBK1 binding. The LxIS and PxPLR motifs are highly conserved in all vertebrate STING alleles. Replacing the CTT of human STING with that of, for example, Tasmanian devil STING, produces a STING variant that induces a type I IFN response, but not an NF-κB response.

[1484] In this Example, the immunostimulatory bacteria are engineered to express a STING variant with increased type I IFN signaling, and/or reduced NF-κB signaling, compared to wild-type (WT) human STING (see, e.g., SEQ ID NOs:305-309). The STING variants can be from a non-human vertebrate, such as a mammalian, bird, reptilian, amphibian, or fish species. Species from which the non-human STING proteins are derived include, but are not limited to, Tasmanian devil (Sarcophilus harrisii; SEQ ID NO:349), marmoset (Callithrix jacchus; SEQ ID NO:359), cattle (Bos taurus; SEQ ID NO:360), cat (Felis catus; SEQ ID NO:356), ostrich (Struthio camelus australis; SEQ ID NO:361), crested ibis (Nipponia nippon; SEQ ID NO:362), coelacanth (Latimeria chalumnae; SEQ ID NOs:363-364), boar (Sus scrofa; SEQ ID NO:365), bat (Rousettus aegyptiacus; SEQ ID NO:366), manatee (Trichechus manatus latirostris; SEQ ID NO:367), ghost shark (Callorhinchus milii; SEQ ID NO:368), and mouse (Mus musculus; SEQ ID NO:369). These vertebrate STING proteins readily activate immune signaling in human cells, indicating that the molecular mechanism of STING signaling is shared in vertebrates (see, e.g., de Oliveira Mann et al. (2019) Cell Reports 27:1165-1175). STING proteins from these species induce less NF-κB signal activation and/or more type I IFN signal activation, than human STING (see, e.g., de Oliveira Mann et al. (2019), FIG. 1A). Wild-type or modified STING proteins from different non-human species can be expressed by the immunostimulatory bacteria herein, as can chimeras of human and non-human STING proteins.

[1485] The various non-human STING proteins are modified, such that the non-human STING has lower NF-κB activation, and, optionally, higher type I interferon activation, than human STING. These non-human STING proteins are modified to include a mutation or mutations so that they have increased type I IFN activity, or act constitutively, in the absence of cytosolic nucleic acid ligands (e.g., CDNs). The mutations typically are amino acid mutations, such as gain-of-function mutations, that are associated with interferonopathies in humans. The corresponding mutations are introduced into the non-human species STING proteins, where corresponding amino acid residues are identified by alignment. For example, mutations include, but are not limited to, S102P, V147L, V147M, N154S, V155M, G166E, C206Y, G207E, S102P/F279L, F279L, R281Q, R284G, R284S, R284M, R284K, R284T, R197A, D205A, R310A, R293A, T294A, E296A, R197A/D205A, S272A/Q273A, R310A/E316A, E316A, E316N, E316Q, S272A, R293A/T294A/E296A, D231A, R232A, K236A, Q273A, S358A/E360A/S366A, D231A/R232A/K236A/R238A, S358A, E360A, S366A, R238A, R375A, and S324A/S326A, with reference to the sequence of human STING, as set forth in SEQ ID NOs:305-309. Corresponding mutations in STING from other species are listed in the tables below. The resulting variants of the non-human STING proteins include one or more of these mutations, and optionally, a CTT replacement, and optionally, a deletion in the TRAF6 binding site.

[1486] The STING variants include one or more replacements of the amino acid serine (S) or threonine (T) at a phosphorylation site, with aspartic acid (D), which is phosphomimetic, resulting in increased or constitutive activity. Other mutations include deletion or replacement of a phosphorylation site or sites, such as 324-326 SLS→ALA in STING, and other replacements to eliminate a phosphorylation site to reduce NF-κB signaling in STING. Additionally, chimeras of human STING with STING from other species are provided, in which the C-terminal tail (CTT) of human STING is replaced with the CTT of STING from another species that has lower NF-κB signaling activity, and/or higher type I IFN signaling activity. The variant STING proteins can include a deletion in the TRAF6 binding site of the CTT, to reduce NF-κB signaling.

| Human | Tasmanian | | | | | Crested | |
|---|---|---|---|---|---|---|---|
| STING | devil | Marmoset | Cattle | Cat | Ostrich | ibis | Coelacanth |
| (SEQ ID | STING | STING | STING | STING | STING | STING | STING |
| NOs: | (SEQ ID | (SEQ ID | (SEQ ID | (SEQ ID | (SEQ ID | (SEQ ID | (SEQ ID |
| 305-309) | NO: 349) | NO: 359) | NO: 360) | NO: 356) | NO: 361) | NO: 362) | NO: 363) |
| S102P | S102P | S102P | S102P | S102P | C107P | V106P | A102P |
| V147L | V147L | V145L | I147L | V146L | M152L | M151L | I147L |
| V147M | V147M | V145M | I147M | V146M | — | — | I147M |
| N154S | N154S | N152S | N154S | N153S | N159S | N158S | G154S |
| V155M | V155M | V153M | V155M | V154M | V160M | V159M | V155M |
| G166E | G166E | G164E | G166E | G165E | G171E | G170E | G166E |
| C206Y | C206Y | C204Y | C206Y | C205Y | C211Y | C210Y | C206Y |
| G207E | S207E | G205E | G207E | G206E | N212E | D211E | S207E |
| S102P/ | S102P/ | S102P/ | S102P/ | S102P/ | C107P/ | V106P/ | A102P/ |
| F279L | F279L | F277L | F279L | F278L | F283L | F283L | F279L |
| F279L | F279L | F277L | F279L | F278L | F283L | F283L | F279L |
| R281Q | R281Q | R279Q | R281Q | R280Q | R285Q | R285Q | K281Q |
| R284G | R284G | R282G | R284G | R283G | R288G | R288G | R284G |
| R284S | R284S | R282S | R284S | R283S | R288S | R288S | R284S |
| R284M | R284M | R282M | R284M | R283M | R288M | R288M | R284M |
| R284K | R284K | R282K | R284K | R283K | R288K | R288K | R284K |
| R284T | R284T | R282T | R284T | R283T | R288T | R288T | R284T |
| R197A | R197A | R195A | R197A | R196A | K202A | K201A | R197A |
| D205A | D205A | D203A | D205A | D204A | S210A | S209A | S205A |
| R310A | R310A | R308A | R310A | R309A | R314A | R314A | R310A |
| R293A | R293A | R291A | R293A | R292A | R297A | R297A | R293A |
| T294A | T294A | T292A | T294A | I293A | T298A | T298A | T294A |
| E296A | E296A | E294A | E296A | E295A | E300A | E300A | K296A |
| R197A/ | R197A/ | R195A/ | R197A/ | R196A/ | K202A/ | K201A/ | R197A/ |
| D205A | D205A | D203A | D205A | D204A | S210A | S209A | S205A |
| S272A/ | S272A/ | S270A/ | S272A/ | S271A/ | S276A/ | S276A/ | S272A/ |
| Q273A | Q273A | Q271A | Q273A | Q272A | Q277A | Q277A | K273A |
| R310A/ | R310A/ | R308A/ | R310A/ | R309A | R314A/ | R314A/ | R310A/ |
| E316A | E316A | E314A | E316A | E315A | E320A | E320A | E318A |
| E316A | E316A | E314A | E316A | E315A | E320A | E320A | E318A |
| E316N | E316N | E314N | E316N | E315N | E320N | E320N | E318N |
| E316Q | E316Q | E314Q | E316Q | E315Q | E320Q | E320Q | E318Q |
| S272A | S272A | S270A | S272A | S271A | S276A | S276A | S272A |
| R375A | R377A | R373A | R374A | R373A | R371A | R379A | K376A |
| R293A/ | R293A/ | R291A/ | R293A/ | R292A/ | R297A/ | R297A/ | R293A/ |
| T294A/ | T294A/ | T292A/ | T294A/ | I293A/ | T298A/ | T298A/ | T294A/ |
| E296A | E296A | E294A | E296A | E295A | E300A | E300A | K296A |
| D231A | D231A | D229A | D231A | D230A | T236A | T235A | N231A |
| R232A | R232A | R230A | R232A | R231A | R237A | R236A | R232A |
| K236A | K236A | K234A | K236A | K235A | K241A | K240A | K236A |
| Q273A | Q273A | Q271A | Q273A | Q272A | Q277A | Q277A | K273A |
| S358A/ | S360A/ | S356A/ | S357A/ | S356A/ | S354A/ | S362A/ | S359A/ |
| E360A/ | E362A/ | E358A/ | E359A/ | E358A/ | D356A/ | E364A/ | E361A/ |
| S366A | S368A | S364A | S365A | S364A | S362A | S370A | S367A |
| D231A/ | D231A/ | D229A/ | D231A/ | D230A/ | T236A/ | T235A/ | N231A/ |
| R232A/ | R232A/ | R230A/ | R232A/ | R231A/ | R237A/ | R236A/ | R232A/ |
| K236A/ | K236A/ | K234A/ | K236A/ | K235A/ | K241A/ | K240A/ | K236A/ |
| R238A | R238A | R236A | R238A | R237A | R243A | R242A | R238A |
| S358A | S360A | S356A | S357A | S356A | S354A | S362A | S359A |
| E360A | E362A | E358A | E359A | E358A | D356A | E364A | E361A |
| S366A | S368A | S364A | S365A | S364A | S362A | S370A | S367A |
| R238A | R238A | R236A | R238A | R237A | R243A | R242A | R238A |
| S324A/ | S326A/ | L322A/ | S324A/ | S323A/ | F328A/ | S328A/ | S327A |
| S326A | S328A | S324A | S326A | S325A | S330A | S330A | |

| Human | | | | | |
|---|---|---|---|---|---|
| STING | Boar | Bat | Manatee | Ghost Shark | Mouse |
| (SEQ ID | STING | STING | STING | STING | STING |
| NOs: | (SEQ ID | (SEQ ID | (SEQ ID | (SEQ ID | (SEQ ID |
| 305-309) | NO: 365) | NO: 366) | NO: 367) | NO: 368) | NO: 369) |
| S102P | S102P | S103P | S105P | S98P | S102P |
| V147L | I147L | V148L | I150L | I148L | V146L |
| V147M | I147M | V148M | I150M | I148M | V146M |
| N154S | N154S | N155S | N157S | N155S | N153S |
| V155M | V155M | V156M | V158M | V156S | V154M |
| G166E | G166E | G167E | G169E | G167E | G165E |
| C206Y | C206Y | C207Y | C209Y | C206Y | C205Y |
| G207E | G207E | G208E | G210E | K207E | G206E |
| S102P/ | S102P/ | S103P/ | S105P/ | S98P/ | S102P/ |
| F279L | F279L | F280L | F282L | F280L | F278L |
| F279L | F279L | F280L | F282L | F280L | F278L |
| R281Q | R281Q | — | R284Q | K282Q | R280Q |
| R284G | R284G | R285G | R287G | R285G | R283G |
| R284S | R284S | R285S | R287S | R285S | R283S |
| R284M | R284M | R285M | R287M | R285M | R283M |
| R284K | R284K | R285K | R287K | R285K | R283K |
| R284T | R284T | R285T | R287T | R285T | R283T |
| R197A | R197A | R198A | R200A | K197A | R196A |
| D205A | D205A | D206A | D208A | S205A | D204A |
| R310A | R310A | R311A | R313A | R311A | R309A |
| R293A | R293A | R294A | R296A | R294A | R292A |
| T294A | T294A | T295A | T297A | T295A | T293A |
| E296A | E296A | — | E299A | K297A | E295A |
| R197A/ | R197A/ | R198A/ | R200A/ | K197A/ | R196A/ |
| D205A | D205A | D206A | D208A | S205A | D204A |
| S272A/ | S272A/ | S273A/ | S275A/ | T273A/ | S271A/ |
| Q273A | Q273A | Q274A | Q276A | N274A | Q272A |
| R310A/ | R310A/ | R311A/ | R313A/ | R311A/ | R309A/ |
| E316A | E316A | E317A | E319A | D317A | E315A |
| E316A | E316A | E317A | E319A | D317A | E315A |
| E316N | E316N | E317N | E319N | D317N | E315N |
| E316Q | E316Q | E317Q | E319Q | D317Q | E315Q |
| S272A | S272A | S273A | S275A | T273A | S271A |
| R375A | S374A | R376A | R383A | R374A | R374A |
| R293A/ | R293A/ | R294A/ | R296A/ | R294A/ | R292A/ |
| T294A/ | T294A/ | T295A | T297A/ | T295A/ | T293A/ |
| E296A | E296A | | E299A | K297A | E295A |
| D231A | D231A | D232A | D234A | D231A | D230A |
| R232A | R232A | R233A | C235A | R232A | R231A |
| K236A | K236A | K237A | K239A | K236A | K235A |
| Q273A | Q273A | Q274A | Q276A | N274A | Q272A |
| S358A/ | S357A/ | H359A/ | S366A/ | S359A/ | S357A/ |
| E360A/ | E359A/ | E361A/ | E368A/ | E361A/ | E359A/ |
| S366A | S365A | S367A | S374A | S367A | S365A |
| D231A/ | D231A/ | D232A/ | D234A/ | D231A/ | D230A/ |
| R232A/ | R232A/ | R233A/ | C235A/ | R232A/ | R231A/ |
| K236A/ | K236A/ | K237A/ | K239A/ | K236A/ | K235A/ |
| R238A | R238A | R239A | R241A | R238A | R237A |
| S358A | S357A | H359A | S366A | S359A | S357A |
| E360A | E359A | E361A | E368A | E361A | E359A |
| S366A | S365A | S367A | S374A | S367A | S365A |
| R238A | R238A | R239A | R241A | R238A | R237A |
| S324A/ | S324A/ | S325A/ | S327A/ | G325A/ | S323A |
| S326A | S326A | S327A | S329A | S330A | /S325A |

[1487] For example, modified STING variants include Tasmanian devil STING with the mutations C206Y (SEQ ID NO:350), or R284G (SEQ ID NO:351); a variant in which the CTT of human STING is replaced with the CTT of Tasmanian devil STING (SEQ ID NO:352); human STING with the mutation C206Y (SEQ ID NO:353), or R284G (SEQ ID NO:354), and where the CTT is replaced with the CTT of Tasmanian devil STING; wild-type human STING with a deletion in the TRAF6 binding domain (corresponding to residues 377-379 (DFS)) (SEQ ID NO:355); cat STING with the mutations C205Y (SEQ ID NO:357), or R283G (SEQ ID NO:358); and other such modified STING variants.

[1488] To determine the corresponding amino acid residues for the STING mutations, the wild-type STING protein sequences from various non-human species each were aligned with the wild-type human STING protein sequence (of the allelic variants of SEQ ID NO:305 (R232 allele) or SEQ ID NO:306 (H232 allele)). The alignments were performed using the Kalign sequence alignment tool, available from ebi.ac.uk/Tools/msa/kalign/, or the EMBOSS needle sequence alignment tool, available from ebi.ac.uk/Tools/psa/emboss_needle/. FIGS. 2-14 depict exemplary sequence alignments for human STING compared to STING proteins from Tasmanian devil, marmoset, cattle, cat, ostrich, crested ibis, coelacanth, zebrafish, boar, bat, manatee, ghost shark, and mouse species, respectively.

### STING GOF Hybrid Variants Demonstrate Significantly Enhanced Type I Interferon to NF-κB Activity Ratios in Dendritic Cells

[1489] In order to determine the optimal STING GOF mutant that would elicit the highest levels of the CD8⁺ T-cell chemokine CXCL10 in mice, a panel of STING mutants were tested in murine primary bone marrow-derived dendritic cells (BMDCs). These included the Tasmanian devil STING with the constitutively active human GOF mutations C206Y (tazSTING C206Y; SEQ ID NO:350), or R284G (tazSTING R284G; SEQ ID NO:351); murine STING with the constitutive GOF mutants C205Y (muSTING C205Y), or R283G (muSTING R283G); cat STING with the constitutive GOF mutants C205Y (catSTING C205Y; SEQ ID NO:357), or R283G (catSTING R283G; SEQ ID NO:358); as well as variants in which the CTT of human STING (SEQ ID NO:370) was replaced with the CTT of Tasmanian devil STING (SEQ ID NO:371), and containing either wild-type human STING (huSTING tazCTT; see, e.g., SEQ ID NO:352), or the human STING GOF mutations C206Y (huSTING C206Y tazCTT; see, e.g., SEQ ID NO:353), or R284G (huSTING R284G tazCTT; see, e.g., SEQ ID NO:354). Also included were human STING variants with the constitutive, GOF mutations C206Y (huSTING C206Y), or R284G (huSTING R284G).

[1490] To test these, murine bone marrow was isolated and flushed into 1.5 mL Eppendorf tubes, and spun at 1200 RPM for 5 minutes, to collect the bone marrow cells. Cells were washed once in RPMI-1640+10% FBS, then seeded in 96-well TC-treated plates in RPMI-1640+10% FBS with 20 ng/ml GM-CSF. Every 2 days, 50% of the medium was replaced with fresh complete media. After six days, non-adherent cells were pipetted off the wells and re-seeded at 1e5 cells per well in RPMI-1640+10% FBS in a 96-well plate for transfection. Cells were transfected using Viromer® RED, according to the manufacturer's instructions. Briefly, 200 ng of plasmid DNA from a panel of STING GOF mutants, as well as untransfected control, were diluted in the provided buffer, and mixed with 0.08 μL of Viromer® RED and incubated at room temperature for 15 minutes to allow the DNA/Viromer® RED complexes to form. The DNA/Viromer® RED complexes were then slowly added to each well of the 96-well plate (in duplicates), and the plate was incubated at 37° C. in a CO₂ incubator. Supernatants were harvested at 48 hours, and assayed for murine CXCL10 (IP-10) using a flow cytometry-based cytokine bead array (CBA), according to the manufacturer's protocol.

[1491] As shown in the table below, the construct that induced the highest expression of murine CXCL10 was human STING containing the GOF mutation R284G, and containing a replacement of the CTT of human STING with the CTT of Tasmanian devil STING (huSTING R284G tazCTT). The next highest expression of CXCL10 was induced by the human STING variant containing the GOF mutation C206Y (huSTING C206Y), and the Tasmanian devil STING construct containing the human STING GOF mutation R284G (tazSTING R284G). The human STING GOF mutants (huSTING C206Y and huSTING R284G) were more potent than the corresponding murine STING GOF mutants (muSTING C205Y and muSTING R283G, respectively), which were even less potent than the cat STING mutants containing the same GOF mutations (catSTING C205Y and catSTING R283G, respectively), in primary murine dendritic cells.

| Construct | muCXCL10 (pg/mL) |
|---|---|
| Untransfected | 11.48 ± 3.889 |
| huSTING C206Y | 861.0 ± 58.48 |
| huSTING R284G | 769.7 ± 95.16 |
| muSTING C205Y | 194 ± 27.15 |
| muSTING R283G | 230.1 ± 1.018 |
| huSTING C206Y tazCTT | 366.6 ± 42.61 |
| huSTING R284G tazCTT | 1326 ± 137.9 |
| tazSTING C206Y | 808.8 ± 95.78 |
| tazSTING R284G | 831.3 ± 30.15 |
| catSTING C205Y | 480.7 ± 24.94 |
| catSTING R283G | 376.2 ± 6.682 |

[1492] These data demonstrate that STING proteins obtained from other species, such as Tasmanian devil, can be combined with constitutive GOF human STING mutations, to elicit potent T-cell recruiting chemokines.

### STING GOF Hybrid Variants Demonstrate Significantly Enhanced Type I Interferon to NF-κB Activity Ratios in Human Monocytes

[1493] In order to demonstrate that the ratio of STING-induced type I interferon to NF-κB signaling can be altered using STING GOF hybrid variants from other species, a panel was tested in a human monocyte cell line. The panel included wild-type human STING (huSTING), and huSTING mutants with the constitutive human GOF mutations C206Y, or R284G; wild-type Tasmanian devil STING (tazSTING), and tazSTING mutants with the constitutive GOF mutations C206Y, or R284G; wild-type cat STING, and catSTING mutants with the constitutive GOF mutations C205, or R283G; murine STING mutants with the constitutive GOF mutations C205Y, or R283G; and the variants in which the CTT of human STING was replaced with the CTT of Tasmanian devil STING, and containing either wild-type human STING, or the human GOF STING mutations C206Y, or R284G. Also included were a wild-type human STING with a deletion in the TRAF6 binding domain (corresponding to residues 377-379, DFS, see, e.g., SEQ ID NO:355), and wild-type zebrafish STING.

[1494] For this experiment, the THP1-Dual™ KO STING cells were utilized, which have been altered to lack endogenous STING, and to also express Lucia™ luciferase, a secreted luciferase, placed under the control of the endogenous IFN-β promoter. Constitutively active STING GOF mutants then were identified, and ranked by measurement of IFN-β promoter induced expression of luciferase activity. These cells also express secreted embryonic alkaline phosphatase (SEAP), placed under the control of the endogenous NF-κB promoter, where the coding sequence of NF-κB has been replaced by the SEAP ORF using knock-in technology. NF-κB activity induced by STING GOF mutants can be assessed by monitoring SEAP production in the cell supernatants.

[1495] For this experiment, THP1-Dual™ KO STING cells were transfected using Viromer® RED, according to the manufacturer's instructions. Briefly, 200 ng of plasmid DNA from a panel of STING GOF mutants, as well as untransfected control, were diluted in the provided buffer, and mixed with 0.08 μL of Viromer® RED and incubated at room temperature for 15 minutes to allow the DNA/Viromer® RED complexes to form. The DNA/Viromer® RED complexes were then slowly added to each well of the 96-well plate (in duplicates), and the plate was incubated at 37° C. in a CO₂ incubator. In addition, the wild-type STING variants were treated with or without the STING agonist 3′5′ RpRp c-di-AMP (CDN, InvivoGen), an analog of the clinical compound ADU-S100, which was added to the cells after 24 hours of incubation at 10 μg/mL. Supernatants were harvested at 48 hours, and assayed for NF-κB-SEAP and IFN-Lucia reporter signals, according to the manufacturer's protocol. Briefly, 10 μL of the cell culture supernatants was added to 50 μL QUANTI-Blue™ reagent (InvivoGen) (which is used for measuring SEAP). NF-κB activation was determined by measuring NF-κB-induced SEAP activity on a SpectraMax® M3 Spectrophotometer (Molecular Devices), at an absorbance (Abs) wavelength of 650 nm. For measuring type I interferon activity from IFN-Lucia, 10 μL of the cell culture supernatants was added to 50 μL QUANTI-Luc™, containing the coelenterazine substrate for the luciferase reaction, which produces a light signal that is quantified using a SpectraMax® M3 luminometer, and expressed as relative light units (RLUs).

[1496] As shown in the table below, the highest type I IFN responses were observed from the variant in which the CTT of human STING was replaced with the CTT of Tasmanian devil STING, and that contained the human STING GOF mutation R284G (huSTING R284G tazCTT), as well as from the wild-type zebrafish STING with the CDN STING agonist (zfSTING WT+CDN). However, unlike the wild-type zebrafish STING, which had very high NF-κB signaling, the huSTING R284G tazCTT variant had high type I IFN signaling with much lower NF-κB signaling activity. The best ratio of higher type I IFN to lower NF-κB signaling was found with the Tasmanian devil STING variant containing the human STING GOF mutation R284G (tazSTING R284G).

| | ISRE- | | NF-κB- | |
|---|---|---|---|---|
| | Lucia ™ | | SEAP | |
| STING Variant | (RLUs) | ±SD | (Abs) | ±SD |
| Untransfected | 47.96 | 33.91 | 0.065 | 0.007 |
| huSTING WT + CDN | 170.8 | 38.15 | 0.100 | 0.014 |
| huSTING WT delTRAF6 + CDN | 164.8 | 8.48 | 0.120 | 0.014 |
| huSTING WT tazCTT + CDN | 31.47 | 10.59 | 0.060 | 0.000 |
| tazSTING WT + CDN | 143.9 | 4.24 | 0.090 | 0.014 |
| zfSTING WT + CDN | 310.2 | 23.31 | 0.690 | 0.028 |
| CMV catSTING WT WPRE + CDN | 202.3 | 6.36 | 0.125 | 0.007 |
| huSTING C206Y | 175.3 | 36.03 | 0.105 | 0.007 |
| huSTING R284G | 143.9 | 29.67 | 0.100 | 0.000 |
| huSTING C206Y tazCTT | 137.9 | 21.19 | 0.095 | 0.007 |
| huSTING R284G tazCTT | 301.2 | 61.46 | 0.250 | 0.127 |
| tazSTING C206Y | 199.3 | 2.12 | 0.120 | 0.000 |
| tazSTING R284G | 217.3 | 19.08 | 0.105 | 0.007 |
| muSTING C205Y | 43.46 | 2.12 | 0.070 | 0.000 |
| muSTING R283G | 32.97 | 4.24 | 0.070 | 0.000 |
| catSTING C205Y | 202.3 | 23.31 | 0.135 | 0.007 |
| catSTING R283G | 157.4 | 10.60 | 0.120 | 0.000 |

SD = Standard deviation

[1497] These data further demonstrate using non-human STING proteins, such as the STING protein from Tasmanian devil, and combining them with human constitutive gain-of-function STING mutations, in order to enhance the beneficial type I interferon activity, while minimizing the immunosuppressive NF-κB activity, in human monocytes.

### Example 18

### S. typhimurium Lipoprotein Knockout by Deletion of the lppA and lppB Genes

[1498] The live attenuated S. typhimurium YS1646 strain, containing the Δasd/ΔFLG/ΔpagP/ΔansB/ΔcsgD gene deletions, was engineered to delete the lppA (SEQ ID NO:387) and lppB (SEQ ID NO:388) genes, in order to remove membrane surface lipoproteins. This reduces pro-inflammatory TLR2 activation, which reduces immunosuppressive cytokines and improves anti-tumor adaptive immunity. As shown below, this also enhances plasmid delivery and encoded protein expression in the tumor.

### Strain Engineering and Characterization

Deletion of lppA Gene

[1499] The lppA gene was deleted from the chromosome of the YS1646Δasd/ΔFLG/ΔpagP/ΔansB/ΔcsgD strain using modifications of the method of Datsenko and Wanner (Proc. Natl. Acad. Sci. U.S.A. 97:6640-6645 (2000)), as described in detail above. Synthetic lppA gene homology arm sequences that contained 231 and 200 bases of the left hand and right hand sequence, respectively, flanking the lppA gene, were synthesized and cloned into a plasmid called pSL0148 (SEQ ID NO:231). The sequence for the lppA gene is shown in SEQ ID NO:387; appropriate primers for PCR amplification were designed using the gene sequence. A kanamycin gene cassette flanked by cre/loxP sites then was cloned into plasmid pSL0148, and the lppA gene knockout cassette was then PCR amplified with primers lppA-1 and lppA-2, gel purified, and then introduced into the YS1646Δasd/ΔFLG/ΔpagP/ΔansB/ΔcsgD strain carrying the temperature sensitive lambda red recombination plasmid pKD46, by electroporation. Electroporated cells were recovered in SOC+DAP medium, and plated onto LB agar plates supplemented with kanamycin (20 μg/mL) and diaminopimelic acid (DAP, 50 μg/mL). Colonies were selected and screened for insertion of the knockout fragment by PCR using primers lppA-3 and lppA-4. pKD46 then was cured by culturing the selected kanamycin resistant strain at 42° C. and screening for loss of ampicillin resistance. The kanamycin resistance marker then was cured by electroporation of a temperature-sensitive plasmid expressing the Cre recombinase (pJW168), and Amp^{R} colonies were selected at 30° C.; pJW168 was subsequently eliminated by growing cultures at 42° C. Selected lppA knockout clones were then tested for loss of the kanamycin marker by PCR, using primers flanking the sites of disruption (lppA-3 and lppA-4), and evaluation of the electrophoretic mobility was performed on agarose gels. This mutant derivative of strain YS1646 was designated YS1646Δasd/ΔFLG/ΔpagP/ΔansB/ΔcsgD/ΔlppA.

Deletion of lppB Gene

[1500] The lppB gene then was deleted in the YS1646Δasd/ΔFLG/ΔpagP/ΔansB/ΔcsgD/ΔlppA strain using modifications of the methods described above. Synthetic lppB gene homology arm sequences that contained 224 and 231 bases of the left hand and right hand sequence, respectively, flanking the lppB gene, were synthesized and cloned into a plasmid called pSL0148 (SEQ ID NO:231). The sequence for the lppB gene is shown in SEQ ID NO:388; appropriate primers for PCR amplification were designed using the gene sequence. A kanamycin gene cassette flanked by cre/loxP sites then was cloned into plasmid pSL0148, and the lppB gene knockout cassette was PCR amplified with primers lppB-5 and lppB-6, gel purified, and introduced into strain YS1646Δasd/ΔFLG/ΔpagP/ΔansB/ΔcsgD/ΔlppA, carrying the temperature-sensitive lambda red recombination plasmid pKD46, by electroporation. The kanamycin resistance gene then was cured by Cre-mediated recombination as described above, and the temperature-sensitive plasmids were cured by growth at non-permissive temperature. The lppA and lppB gene knockout sequences were amplified by PCR, using primers designated lppA-3 and lppA-4, and lppB-7 and lppB-8, respectively, and verified by DNA sequencing. This mutant derivative of strain YS1646 was designated YS1646Δasd/ΔFLG/ΔpagP/ΔansB/ΔcsgD/ΔlppAB, or nicknamed YS1646ΔlppAB.

In vitro Characterization of Engineered S. typhimurium Lipoprotein Knockout Strain

[1501] The YS1646Δasd/ΔFLG/ΔpagP/ΔansB/ΔcsgD/ΔlppAB strain, harboring the deletions of lppA and lppB, was evaluated for growth by overnight cultures in LB. Growth was measured using a SpectraMax® M3 Spectrophotometer (Molecular Devices) at 37° C., reading the OD₆₀₀ every 15 minutes. The results demonstrated that strain YS1646Δasd/ΔFLG/ΔpagP/ΔansB/ΔcsgD/ΔlppAB was able to replicate in LB at a growth rate comparable to the parental YS1646Δasd/ΔFLG/ΔpagP/ΔansB/ΔcsgD strain. These data demonstrate that the elimination of lipoprotein does not decrease the fitness of S. typhimurium in vitro.

### Lipoprotein Deletion Enhances Plasmid Delivery to the Tumor After Systemic Administration

[1502] As TLR2 is expressed on vascular endothelial cells, and activation of TLR2 enhances vascular permeability, the effect of the ΔlppAB modification, and the subsequent reduction in TLR2 agonism, on tumor colonization was assessed. The effect on payload expression also was assessed. As shown below, while colonization of tumors was somewhat reduced, plasmid delivery and encoded gene expression was significantly increased, following systemic administration.

[1503] To demonstrate the impact of the lipoprotein knockout strains in a murine model of triple-negative breast cancer, 6-8 week-old female BALB/c mice (4 mice per group) were inoculated orthotopically in the 4^{th} mammary fat pad with EMT6 cells (5×10⁵ cells in 100 μL PBS). Mice bearing 10-day established flank tumors were IV injected with a single dose of 1×10⁷ CFUs of the YS1646Δasd/ΔFLG/ΔpagP/ΔansB/ΔcsgD/ΔlppAB strain, or the parental YS1646Δasd/ΔFLG/ΔpagP/ΔansB/ΔcsgD strain, each containing a plasmid encoding a luciferase protein (NanoLuciferase® luciferase, or NanoLuc®; Promega) that is secreted (secNanoLuc®), under the control of the CMV promoter. At day 7 post IV dosing, mice were euthanized, and tumors were homogenized and plated on LB plates, to enumerate the number of colony forming units (CFUs) per gram of tumor tissue. The parental YS1646Δasd/ΔFLG/ΔpagP/ΔansB/ΔcsgD strain colonized tumors at a mean of 3.3×10⁶ CFUs per gram of tumor tissue, while the lipoprotein-deleted YS1646Δasd/ΔFLG/ΔpagP/ΔansB/ΔcsgD/ΔlppAB strain colonized the tumors with a 2-fold decreased mean of 1.18×10⁶ CFUs/g of tumor tissue.

[1504] In order to measure plasmid delivery to the tumor, and subsequent heterologous gene expression and protein secretion, the activity of the secNanoLuc® was measured. For this, homogenized tumors were assessed for luciferase activity using the NanoGlo® detection reagent (Promega), and read on a SpectraMax® M3 Spectrophotometer/Luminometer (Molecular Devices). While the parental YS1646Δasd/ΔFLG/ΔpagP/ΔansB/ΔcsgD strain induced average luminescence relative light units (RLUs) of 4482.6, the YS1646Δasd/ΔFLG/ΔpagP/ΔansB/ΔcsgD/ΔlppAB strain induced a nearly 10-fold increased average of 33,926.6 RLUs. These data demonstrate the ability of the lipoprotein-deleted strain to improve tumor colonization, and to enhance payload expression.

[1505] These data reveal that, while deletion of lipoprotein somewhat reduces tumor colonization after IV dosing, it significantly enhances plasmid delivery and payload expression in the tumor. These data demonstrate that, contrary to the expectation from the art that deletion of these genes will decrease colonization, lipoprotein deletion enhances plasmid delivery and protein expression in the tumor microenvironment, and in tumors.

### Example 19

### Salmonella Full purI Clean Deletion Gene Knockout Strain Engineering and Characterization

[1506] The purI gene in strain YS1646 (VNP20009) was not deleted; it was disrupted by a transposon (Tn10) insertion that resulted in a 16.6 kbp (kilobase pair) genomic inversion event, whereby two insertion sequence (IS) elements were subsequently incorporated into the genome, one within the purI (purM) gene, and the other 16.6 kbp upstream, in the intergenic region directly flanking the 3′-end of the acrD gene. The region between the two IS elements is inverted and contains 18 genes, including yffB, DC51_2568, upp, uraA, yfgE, yfgD, DC51_2573, perM, purC, and others. The insertion sequence element in the intergenic region encodes a fully functional transposase (see, e.g., Broadway et al. (2014) J. Biotechnology 192:177-178). The presence of such a transposase in a therapeutic strain presents a possible genetic stability concern. These elements were removed from the strain, for development of the strain as a human therapy. The presence of the complete genetic sequence of the purI gene, disrupted by means of a chromosomal reengagement, leaves open the possibility of reversion to a wild-type gene.

[1507] The msbB gene in strain YS1646 also was not fully deleted, but was disrupted by a genetically engineered 511 bp deletion (of the 972 bp gene) that resulted in an extension of the pykA gene (encoding pyruvate kinase), replacing the last 5 amino acid codons with 13 new codons (see, e.g., Broadway et al. (2014) J. Biotechnology 192:177-178).

[1508] Strain YS1646Δasd/ΔFLG/ΔpagP/ΔansB/ΔcsgD was modified to delete the remaining portions of the purI gene and the two transposon-associated insertion sequence elements present in strain YS1646. It is shown below, that with a full knockout of purI, the resulting bacterial cells have higher viability than the cells in which the gene is inactivated by disruption, as in the parental YS1646 strain.

A. Deletion of purI Gene Fragments and Transposon-Associated Insertion Sequence Elements

[1509] A first region, located between the yffB and purN genes, and containing: 1) a 1,209 bp transposon insertion sequence element, annotated as DC51_2586 in the sequence obtained from Broadway et al. (2014) (see, GenBank Accession numbers CP007804 and CP008745); and 2) 740 bp of the remaining 891 bp purI gene fragment (referred to herein as the large purI gene fragment), was targeted for deletion, using modifications of the method of Datsenko and Wanner (see, Proc. Natl. Acad. Sci. U.S.A. 97:6640-6645 (2000)). A small 151 bp portion of the 891 bp (large) purI gene fragment was left intact to avoid affecting the adjacent, downstream gene, purN. A plasmid, pSL0165, containing 284 and 262 bps of homology to the left hand and right hand regions, respectively, of the DC51_2586 insertion sequence element and the purI gene fragment, was transformed into DH5-alpha competent cells (Thermo Fisher Scientific). A kanamycin gene cassette flanked by loxP sites was cloned into this plasmid, and the resulting vector was designated pSL0174. The DC51_2586 insertion sequence element and the large purI gene fragment knockout cassette then was PCR amplified using primers purm-1 and purm-2 (SEQ ID NOs: 419 and 420, respectively; see Table 2 below), gel purified, and introduced into strain YS1646Δasd/ΔFLG/ΔpagP/ΔansB/ΔcsgD carrying the temperature sensitive lambda red recombination plasmid pKD46, by electroporation. The kanamycin resistance gene then was cured by Cre-mediated recombination, as described above, and the temperature-sensitive plasmids were cured by growth at non-permissive temperature. The DC51_2586 insertion sequence element and large purI gene fragment knockout sequences were confirmed by PCR using primers purm-3 and purm-4 (SEQ ID NOs: 421 and 422, respectively; see Table 2), and verified by DNA sequencing. The resulting mutant derivative of parental strain YS1646Δasd/ΔFLG/ΔpagP/ΔansB/ΔcsgD was designated YS1646Δasd/ΔFLG/ΔpagP/ΔansB/ΔcsgD/ΔpurI_{(large clean)}.

[1510] A second region, located between the acrD and DC51_2568 genes, and containing: 1) a 1,209 bp transposon insertion sequence element, annotated as DC51_2566 in the sequence obtained from Broadway et al. (2014) (see, GenBank Accession numbers CP007804 and CP008745); and 2) the remaining 231 bp purI gene fragment (referred to herein as the small purI gene fragment), was targeted for deletion, using modifications of the method of Datsenko and Wanner (see, Proc. Natl. Acad. Sci. U.S.A. 97:6640-6645 (2000)). A plasmid, pSL0210, containing 241 and 265 bps of homology to the left hand and right hand regions, respectively, of the DC51_2566 insertion sequence element and the small purI gene fragment, was transformed into DH5-alpha competent cells (Thermo Fisher Scientific). A kanamycin gene cassette flanked by loxP sites was cloned into this plasmid, and the resulting vector was designated pSL0212. The DC51_2566 insertion sequence element and the small purI gene fragment knockout cassette then was PCR amplified using primers acrd-1 and purm-5 (SEQ ID NOs: 425 and 423, respectively; see, Table 2), gel purified, and introduced into strain YS1646Δasd/ΔFLG/ΔpagP/ΔansB/ΔcsgD/ΔpurI_{(large clean)} carrying the temperature sensitive lambda red recombination plasmid pKD46, by electroporation. The kanamycin resistance gene then was cured by Cre-mediated recombination, as described above, and the temperature-sensitive plasmids were cured by growth at non-permissive temperature. The DC51_2566 insertion sequence element and small purI gene fragment knockout sequences were confirmed by PCR using primers purm-6 and acrd-3 (SEQ ID NOs: 424 and 426, respectively; see Table 2), and verified by DNA sequencing. The resulting mutant derivative of parental strain YS1646Δasd/ΔFLG/ΔpagP/ΔansB/ΔcsgD/ΔpurI_{(large clean)} was designated as YS1646Δasd/ΔFLG/ΔpagP/ΔansB/ΔcsgD/ΔpurI_{(large clean)}, or alternatively, YS1646Δasd/ΔFLG/ΔpagP/ΔansB/ΔcsgD/F-ΔpurI.

TABLE 2
Primer Sequence Information

| | | | SEQ ID |
|---|---|---|---|
| Primer | Primer Sequence | Primer Description | NO. |
| purm-1 | ccagatgtggcttgtttatacttcgc | Fwd primer for amplifying the | 419 |
| | | DC51_2586 insertion sequence element | |
| | | and the large pur (740 bp) fragment | |
| | | gene KO cassette | |
| purm-2 | ccttattgctgaatactgccctgag | Rev primer for amplifying the | 420 |
| | | DC51_2586 insertion sequence element | |
| | | and the large purI (740 bp) gene | |
| | | fragment KO cassette | |
| purm-3 | cgtgtcgcaattcttaatgccatag | Fwd primer for checking DC51_2586 | 421 |
| | | insertion sequence element and the | |
| | | large purI (740 bp) gene fragment KO | |
| purm-4 | caaacatcggactcagaatacgc | Rev primer for checking DC51_2586 | 422 |
| | | insertion sequence element and the | |
| | | large purl (740 bp) gene fragment KO | |
| purm-5 | caggcgataaaggctaacaaccg | Rev primer for amplifying the | 423 |
| | | DC51_2566 insertion sequence element | |
| | | and the small purI (231 bp) gene | |
| | | fragment KO cassette | |
| purm-6 | ttgacctggatcaaccaaaagcg | Rev primer for checking the | 424 |
| | | DC51_2566 insertion sequence element | |
| | | and the small purI (231 bp) gene | |
| | | fragment KO | |
| acrd-1 | cctgcgaccgatactgatgac | Fwd primer for amplifying the | 425 |
| | | DC51_2566 insertion sequence element | |
| | | and the small purI (231 bp) gene | |
| | | fragment KO cassette | |
| acrd-3 | gctactcgctacctggatgc | Fwd primer for checking the | 426 |
| | | DC51_2566 insertion sequence element | |
| | | and the small purI (231 bp) gene KO | |

Fwd = forward; Rev = reverse; KO = knockout

### Plasmid Information

| | | Vector | | |
|---|---|---|---|---|
| | Synthetic | Name after | Homology | |
| | DNA | Kanamycin | Arm Length | |
| Gene Sequence | Vector | Cloning | Left Hand | Right Hand |
| purI large (740 bp) | pSL0165 | pSL0174 | 284 bp | 262 bp |
| fragment | | | | |
| purI small (231 bp) | pSL0210 | pSL0212 | 241 bp | 265 bp |
| fragment | | | | |

### B. Strain YS1646Δasd/ΔFLG/ΔpagP/ΔansB/ΔcsgD/F-ΔpurI Displays Enhanced Injection Stock Cell Viability

[1512] To evaluate the effects of the deletions of the remaining purI gene sequence fragments and the transposon-associated insertion sequence elements on the in vitro fitness of the bacteria, the cell viability of strains of YS1646Δasd/ΔFLG/ΔpagP/ΔansB/ΔcsgD, with and without the full purI gene deletion (F-ΔpurI), and carrying the same plasmids, was compared.

[1513] The cell viability of strains of YS1646Δasd/ΔFLG/ΔpagP/ΔansB/ΔcsgD/F-ΔpurI, containing either plasmid ADN-657 (pATI1.76 CMV muIL-15Rα-IL-15sc_T2A_huSTING N154S/R284G tazCTT HPRE bGHpA), or plasmid ADN-750 (pATI2.1 CMV VCIP huIL-15Rα-IL-15sc_T2A_huSTING N154S/R284G tazCTT HPRE bGHpA), and the cell viability of strains of YS1646Δasd/ΔFLG/ΔpagP/ΔansB/ΔcsgD, expressing the same plasmids (ADN-657 and ADN-750), was evaluated by directly comparing viable CFUs after culture processing for frozen injection stocks. Plasmid ADN-657 encodes murine IL-15Rα-IL-15sc and a modified human STING chimera, with a replacement of the CTT of human STING with the CTT of Tasmanian devil STING, and the GOF mutations N154S/R284G (huSTING N154S/R284G tazCTT). The two payloads are expressed under the control of a CMV promoter, from a bicistronic construct comprising a T2A peptide. The construct also includes a Hepatitis B virus Posttranscriptional Regulatory Element (HPRE), and a bovine growth hormone polyadenylation signal sequence (bGHpA). Plasmid ADN-750 encodes human IL-15Rα-IL-15sc and the same modified human STING chimera, where expression of the two payloads is under control of a CMV promoter, and the single promoter system is achieved using an endogenous human IRES (Internal Ribosome Entry Site), known as Vascular Endothelial Growth Factor and Type 1 Collagen Inducible Protein (VCIP; SEQ ID NO:434), placed upstream of the nucleic acid encoding both payloads, as well as a T2A peptide sequence, placed between the two ORFs.

[1514] For this experiment, 100 μl of overnight stationary phase cultures, of equivalent OD_{600 nm}. optical density (OD) values, were used to inoculate 25 ml of 4XYT media in 250 ml baffled shaker flasks with vented caps, and the cultures were incubated at 37° C. with shaking (at 225 RPM) for approximately 6 hours. Cultures were harvested at stationary phase at equivalent OD_{600 nm}. values, washed twice, adjusted to OD_{600 nm}=2, aliquoted, and frozen at −80° C. The following day, two aliquots of each strain were thawed, the OD_{600 nm}. values were measured, and the strains were plated on agar plates to determine the titer and viability. % viability was determined from the ratio of OD_{600 nm}. to CFUs/ml.

[1515] Strain YS1646Δasd/ΔFLG/ΔpagP/ΔansB/ΔcsgD/F-ΔpurI-(ADN-657) injection stock was determined to be 77% viable, while strain YS1646Δasd/ΔFLG/ΔpagP/ΔansB/ΔcsgD-(ADN-657) injection stock was determined to be 62% viable. Strain YS1646Δasd/ΔFLG/ΔpagP/ΔansB/ΔcsgD/F-ΔpurI-(ADN-750) injection stock was determined to be 72% viable, while strain YS1646Δasd/ΔFLG/ΔpagP/ΔansB/ΔcsgD-(ADN-750) injection stock was determined to be 63% viable.

[1516] These data demonstrate a similar or enhanced fitness profile for strain YS1646Δasd/ΔFLG/ΔpagP/ΔansB/ΔcsgD/F-ΔpurI compared to the parental strain, YS1646Δasd/ΔFLG/ΔpagP/ΔansB/ΔcsgD. Strain YS1646Δasd/ΔFLG/ΔpagP/ΔansB/ΔcsgD/F-ΔpurI displayed improved viability following frozen injection stock preparation, indicating that the genomic deletions not only diminish a potential genetic instability issue, but also provide a metabolic benefit that is manifested as increased cell viability.

### C. Strain YS1646Δasd/ΔFLG/ΔpagP/ΔansB/ΔcsgD/F-ΔpurI Displays Similar Growth Characteristics in Broth Media Compared to the YS1646Δasd/ΔFLG/ΔpagP/ΔansB/ΔcsgD Parental Strain

[1517] To evaluate the effects of the deletions of the remaining purI gene sequence fragments and the transposon-associated insertion sequence elements on the in vitro fitness of the bacterial strains, broth medium growth was compared between strains of YS1646Δasd/ΔFLG/ΔpagP/ΔansB/ΔcsgD/F-ΔpurI, expressing either plasmid ADN-657 (pATI1.76 CMV muIL-15Rα-IL-15sc_T2A_huSTING N154S/R284G tazCTT HPRE bGHpA) or plasmid ADN-750 (pATI2.1 CMV VCIP huIL-15Rα-IL-15sc_T2A_huSTING N154S/R284G tazCTT HPRE bGHpA), and strains of YS1646Δasd/ΔFLG/ΔpagP/ΔansB/ΔcsgD, expressing the same plasmids (ADN-657 and ADN-750). Frozen injection stocks were thawed at room temperature, and normalized to 1×10⁷ CFU/mL by diluting in PBS. 10 μL of the normalized samples were used to inoculate 300 μL of LB media (1×10⁵ CFU/well) in a clear, flat-bottomed 96-well plate in technical quadruplicate. The plate was incubated with shaking at 37° C., and the OD_{600 nm}. values were monitored in 15 minute intervals over the course of 16 hours. OD_{600 nm}. values were plotted to construct growth curves, and the slope of the log phase of growth was calculated and used to determine the doubling time for each strain.

[1518] Each of strains YS1646Δasd/ΔFLG/ΔpagP/ΔansB/ΔcsgD/F-ΔpurI-(ADN-657), YS1646Δasd/ΔFLG/ΔpagP/ΔansB/ΔcsgD-(ADN-657), YS1646Δasd/ΔFLG/ΔpagP/ΔansB/ΔcsgD/F-ΔpurI-(ADN-750) and YS1646Δasd/ΔFLG/ΔpagP/ΔansB/ΔcsgD-(ADN-750) generated comparable growth profiles, and reached similar cell densities at stationary phase. Strain YS1646Δasd/ΔFLG/ΔpagP/ΔansB/ΔcsgD/F-ΔpurI-(ADN-657) had a doubling time of 77 minutes, strain YS1646Δasd/ΔFLG/ΔpagP/ΔansB/ΔcsgD-(ADN-657) had a doubling time of 62 minutes, strain YS1646Δasd/ΔFLG/ΔpagP/ΔansB/ΔcsgD/F-ΔpurI-(ADN-750) had a doubling time of 72 minutes, and strain YS1646Δasd/ΔFLG/ΔpagP/ΔansB/ΔcsgD-(ADN-750) had a doubling time of 63 minutes. These data demonstrate a similar fitness profile for strain YS1646Δasd/ΔFLG/ΔpagP/ΔansB/ΔcsgD/F-ΔpurI compared to the parental strain, YS1646Δasd/ΔFLG/ΔpagP/ΔansB/ΔcsgD. Strain YS1646Δasd/ΔFLG/ΔpagP/ΔansB/ΔcsgD/F-ΔpurI displayed slightly increased doubling time in broth medium, but generated similar growth curve profiles and stationary phase cell densities, compared to the parental strain.

### Example 20

### Genetically Modified Strains Reduce Inflammation in Whole Human Blood and in Primary Human Macrophages

[1519] To evaluate the inflammatory profiles resulting from the administration of different variants of the immunostimulatory bacterial strains, strains ATCC #14028 (wild-type (WT) S. typhimurium), YS1646, YS1646Δasd, YS1646Δasd/ΔFLG, YS1646Δasd/ΔFLG/ΔpagP, YS1646Δasd/ΔFLG/ΔpagP/ΔansB/ΔcsgD, YS1646Δasd/ΔFLG/ΔpagP/ΔansB/ΔcsgD/F-ΔpurI, and E. coli strain NEB 5-alpha, each carrying plasmids (CMV NanoLuc®) that encode the luciferase NanoLuciferase® (Promega), were incubated with human blood for 2 hours at 37° C. The incubations were in performed in a 96-well format, with 200 μl of blood and 5×10³ CFUs of bacteria. At 2 hours post-infection, the blood was centrifuged at 300 relative centrifugal force (rcf) for 5 minutes, and serum was isolated for cytokine profile analysis by human antiviral cytokine bead array analysis (BioLegend), in accordance with the manufacturer's instructions.

[1520] Analysis of the levels of cytokines released from the human blood, following incubation with the various strains, showed that incubation with strain YS1646 resulted in reduced the levels of the pro-inflammatory cytokines IL-6 and TNF-α, compared to incubation with WT strain ATCC 14028. Additional genomic modifications further reduced the levels of pro-inflammatory cytokines released from the human blood.

| | Cytokine Levels | | | |
|---|---|---|---|---|
| | IL-6 | | TNF-α | |
| | Mean | | Mean | |
| Strain | (pg/ml) | STDEV | (pg/ml) | STDEV |
| Uninfected control | 18.8 | ±1.1 | 69.2 | ±2.9 |
| Wild-type S. typhimurium strain ATCC 14028 | 155.1 | ±32.7 | 464.3 | ±77.9 |
| (CMV NanoLuc ®) | | | | |
| YS1646 (CMV NanoLuc ®) | 48.1 | ±20.4 | 105.0 | ±24.4 |
| YS1646Δasd (CMV NanoLuc ®) | 19.3 | ±1.2 | 68.4 | ±6.1 |
| YS1646Δasd/ΔFLG (CMV NanoLuc ®) | 23.7 | ±4.4 | 78.3 | ±6.0 |
| YS1646Δasd/ΔFLG/ΔpagP (CMV NanoLuc ®) | 17.1 | ±5.7 | 57.8 | ±19.9 |
| YS1646Δasd/ΔFLG/ΔpagP/ΔansB/ΔcsgD | 21.1 | ±7.6 | 74.2 | ±33.4 |
| (CMV NanoLuc ®) | | | | |
| YS1646Δasd/ΔFLG/ΔpagP/ΔansB/ΔcsgD/F- | 21.0 | ±1.3 | 75.1 | ±4.9 |
| ΔpurI (CMV NanoLuc ®) | | | | |
| E. coli NEB 5-alpha (CMV NanoLuc ®) | 152.9 | ±24.1 | 519.0 | ±236.5 |

STDEV = standard deviation

[1521] To determine the how the genomic modifications in bacteria, such as S. typhimurium, influence inflammation during infection of primary human myeloid cells, bactofection of human M2 macrophages was performed. Primary human monocytes were differentiated in ImmunoCult™-SF Macrophage Medium (StemCell Technologies), containing 100 ng/ml human macrophage colony-stimulating factor (M-CSF), for 5 days. On day 6, cells were supplemented with additional medium containing 150 ng/ml M-CSF and 60 ng/ml huIL-4 for 48 hours, to generate M2 macrophages. The cells then were infected with stationary phase bacterial strains (strains described above), which were grown overnight at 37° C. in 4XYT medium, at an MOI of 10. The cells were inoculated with bacteria, and centrifuged for 5 minutes at 500 rcf, followed by an incubation at 37° C. for 1 hour. The cells then were washed twice with DPBS, and then incubated in fresh ImmunoCult™-SF Macrophage Medium with 100 μg/ml gentamicin. Supernatants were harvested at 0, 2, 6, 24, and 48 hours post-infection. The cytokine measurements were performed by MESO scale analysis, according to the manufacturer's instructions.

[1522] The results, which are summarized in the table below, show that, at 24 hours post-infection, macrophages infected with strains YS1646, YS1646Δasd, and YS1646Δasd/ΔFLG released the highest levels of IL-6, with WT bacteria (strain ATCC 14028) inducing less IL-6. Successive genomic modifications resulting in decreased levels of IL-6 secretion, with strains YS1646Δasd/ΔFLG/ΔpagP/ΔcsgD and YS1646Δasd/ΔFLG/ΔpagP/ΔansB/ΔcsgD inducing the lowest levels of IL-6. Similar trends were observed with TNF-α.

| | Cytokine Levels, 24 hours | | | |
|---|---|---|---|---|
| | IL-6 | | TNF-α | |
| | Mean | Range | Mean | Range |
| Strain | (pg/ml) | (pg/ml) | (pg/ml) | (pg/ml) |
| Uninfected control | 1.1 | — | 1.23 | — |
| Wild-type S. typhimurium strain ATCC | 10450.7 | 285.0 | 2895.508 | 230.262 |
| 14028 (CMV NanoLuc ®) | | | | |
| YS1646 (CMV NanoLuc ®) | 13653.2 | 332.3 | 5282.976 | 71.708 |
| YS1646Δasd (CMV NanoLuc ®) | 14516.3 | 693.3 | 5100.7465 | 793.867 |
| YS1646Δasd/ΔFLG (CMV NanoLuc ®) | 13767.5 | 1540.7 | 3572.248 | 150.534 |
| YS1646Δasd/ΔFLG/ΔpagP (CMV | 6985.6 | 650.2 | 758.4872 | 136.6448 |
| NanoLuc ®) | | | | |
| YS1646Δasd/ΔFLG/ΔpagP/ΔcsgD (CMV | 6746.1 | 622.0 | 1431.149 | 367.154 |
| NanoLuc ®) | | | | |
| YS1646Δasd/ΔFLG/ΔpagP/ΔansB/ΔcsgD | 6584.1 | 1389.7 | 502.1081 | 44.983 |
| (CMV NanoLuc ®) | | | | |

### Example 21

### csgD-Deleted Strains Induce Vascular Leakage in Human Vascular Endothelial Cells

[1523] The ability to promote vascular leakage is an advantageous feature for facilitating bacterial entry into the tumor vasculature, and for promoting greater tumor colonization. It is shown in this example that ΔcsgD strains possess this feature.

[1524] Parental strain YS1646 (VNP20009) was compared to the derivative strains YS1646Δasd/ΔFLG/ΔpagP and YS1646Δasd/ΔFLG/ΔpagP/ΔansB/ΔcsgD, for the ability to activate innate immune sensing in human umbilical vein endothelial cells (HUVECs), and for the ability to stimulate a subsequent increase in endothelial monolayer permeability. This was assessed using an In Vitro Vascular Permeability Assay kit (Millipore, Catalog No. ECM642). Strains of YS1646Δasd/ΔFLG/ΔpagP and YS1646Δasd/ΔFLG/ΔpagP/ΔansB/ΔcsgD, each containing a plasmid encoding secreted NanoLuciferase® (EF-1α secNanoLuc®), were used. Human umbilical vein endothelial cells (HUVECs) were seeded onto semi-permeable collagen-coated membrane inserts, in a 96-well plate chamber, according to the manufacturer's instructions, at a concentration of 5×10³ cells/well. Confluency was monitored daily, until endothelial monolayer formation was confirmed, and determined to efficiently occlude the membrane pores (96 hours post-seeding).

[1525] The bacterial strains were grown in 3 mL of 4XYT media (TEKNOVA, Catalog No. 2Y1085), with shaking at 37° C. in vented cap 50 mL conical vials, overnight to stationary phase, and were prepared the following day by pelleting and re-suspending in PBS. Bacterial samples were normalized by OD_{600 nm} to a concentration of 2.5×10⁸ CFU/mL, and were added to the HUVEC insert wells in 100 μL volume, to achieve an MOI of 50. The plate was spun at 500 rcf for 5 minutes to synchronize engagement of CFUs with HUVECs, and then the plate was incubated for 1 hour at 37° C. Gentamicin was then added to the insert wells to a final concentration of 200 μg/mL. At 24 hours post-bactofection, medium in the inserts was collected (and saved for cytokine analysis), and 75 μL of Fluorescein isothiocyanate-Dextran (FITC-Dextran; at a 1:40 dilution) was added, and the mixture was incubated in the dark, at room temperature, for 20 minutes. Medium from the receiver tray was collected and analyzed on a spectrophotometer at an excitation wavelength of 485 nm and an absorbance wavelength of 535 nm, and 1:40 FITC-Dextran solution was run directly as a positive control.

[1526] At 24 hours post-bactofection, and following incubation with FITC-Dextran solution, wells that were not treated with engineered, attenuated S. typhimurium strains (i.e., medium alone) generated very low fluorescence values (35), indicating confluency and little disruption of permeability. The parental YS1646-treated wells permitted the greatest amount of FITC-Dextran to pass through the membrane (fluorescence=155), indicating the strongest innate immune stimulation and increase in vascular permeability, while the engineered, attenuated S. typhimurium strains YS1646Δasd/ΔFLG/ΔpagP and YS1646Δasd/ΔFLG/ΔpagP/ΔansB/ΔcsgD permitted less FITC-Dextran to pass through (fluorescence=84 and 91, respectively), yet still maintained the ability to promote vascular permeability.

[1527] To test whether this effect was dependent on cytokines released from the HUVECs, and in particular, IL-6, a human antiviral cytokine bead array analysis (BioLegend) was performed on HUVEC supernatants at 6 hours post-infection, in accordance with the manufacturer's instructions. HUVECs infected with the parental YS1646 strain exhibited very high IL-6 levels (1769.2 pg/mL), compared to the uninfected control (27.19 pg/mL). The YS1646Δasd/ΔFLG/ΔpagP strain induced lower levels of IL-6 (543.3 pg/mL), and the lowest amount of IL-6 was observed with the YS1646Δasd/ΔFLG/ΔpagP/ΔansB/ΔcsgD strain (272.8 pg/mL). Therefore, despite producing lower levels of pro-inflammatory cytokines that induce vascular leakage, the YS1646Δasd/ΔFLG/ΔpagP/ΔansB/ΔcsgD strain demonstrated higher levels of leakage than the YS1646Δasd/ΔFLG/ΔpagP strain. Thus, the ability to promote vascular leakage is an important feature for facilitating bacterial entry into the tumor vasculature, and for promoting greater tumor colonization. Strains described and provided herein possess this feature.

### Example 22

### STING Gain-Of-Function Variants Demonstrate Increased CXCL10 (IP-10) to IL-6 Ratios and Increased IFN-β to IL-6 Ratios in Primary Human M2 Macrophages

[1528] To determine the effects of various STING gain-of-function (GOF) mutants (including chimeric STING proteins with GOF mutations), on the downstream cytokine signaling in human M2 macrophages, the GOF mutants were cloned into the pATI-1.75 (also referred to as pATI1.75) vector, described in Example 8 above, which then was transfected into human M2 macrophages for expression, and the cell supernatants were assayed for secreted (expressed) cytokines.

[1529] Frozen human monocytes, isolated from healthy human donors, were thawed in complete medium (RPMI-1640+10% FBS), and washed by centrifugation for 10 minutes at 600×g, at room temperature. The monocytes were resuspended in ImmunoCult™-SF Macrophage Medium (StemCell Technologies) containing 100 ng/mL of human M-CSF+20 ng/mL of human IL-4+20 ng/mL of human IL-10. Monocytes (8e5 to 1e6 cells per well) were then seeded in a 24-well plate, with a final volume of 750 μL. Three days later, 750 μL of ImmunoCult™-SF Macrophage Medium (StemCell Technologies), containing 100 ng/mL human M-CSF+20 ng/mL human IL-4+20 ng/mL human IL-10, was added to each well, and the plate was incubated for four more days. On day seven, the cells were transfected using Viromer® RED mRNA and plasmid transfection reagent (Lipocalyx GmbH), according to the manufacturer's instructions. 500 ng of plasmid DNA from a panel of STING GOF mutants, as well as untransfected control, were diluted in the provided buffer, and mixed with the Viromer® RED transfection reagent, and incubated at room temperature for 15 minutes to allow the DNA/Viromer® RED complexes to form. The DNA/Viromer® RED complexes were then slowly added to each well of the 24-well plate (in triplicate), and the plate was incubated at 37° C. in a 5% CO₂ incubator. Supernatants were harvested after 48 hours of incubation, and were assayed for human CXCL10 (IP-10) and IL-6 using a flow cytometry-based human anti-viral cytokine bead array (BioLegend), according to the manufacturer's protocol. The average of three measurements was calculated, and the ratio of IP-10 to IL-6 was calculated by dividing the IP-10 concentration by the IL-6 concentration.

[1530] The results, which are summarized in the table below, show that the STING variant that resulted in the highest ratio of IP-10 to IL-6 was the huSTING N154S/R284G tazCTT variant (i.e., a chimeric STING protein, containing a modified human STING with a replacement of the CTT with the CTT of Tasmanian devil STING, and the GOF mutations N154S/R284G). The STING variant, containing a replacement of the CTT of human STING with the CTT of Tasmanian devil STING (huSTING tazCTT), displayed higher ratios of IP-10 to IL-6 than the corresponding fully human STING variants with the same mutations, thus, demonstrating an improved anti-tumor response.

Ratio of IP-10 to IL-6 Protein Expression Following Transfection of M2 Macrophages with Plasmids Encoding STING Variants

| | Mean Ratio of IP-10 | Standard |
|---|---|---|
| STING Variant | to IL-6 Expression | Deviation |
| Untransfected | 0.6108 | ±0.0960 |
| huSTING N154S | 3.174 | ±0.2006 |
| huSTING R284G | 3.938 | ±0.6123 |
| huSTING N154S/R284G | 3.832 | ±0.1185 |
| huSTING tazCTT N154S | 4.400 | ±0.1957 |
| huSTING tazCTT R284G | 4.497 | ±0.1631 |
| huSTING tazCTT N154S/R284G | 5.253 | ±0.1695 |

[1531] The ratio of IFN-β to IL-6 gene expression in human M2 macrophages, following the expression of various STING variants, was assessed. Frozen human monocytes, isolated from healthy human donors, were thawed in complete medium (RPMI-1640+10% FBS), and washed by centrifugation for 10 minutes at 600×g, at room temperature. The monocytes were resuspended in RPMI-1640+1× non-essential amino acids (NEAA)+5% human AB serum, containing 200 ng/mL human M-CSF+20 ng/mL human IL-4. Monocytes (8e5 to 1e6 cells per well) were then seeded in a 24-well plate, with a final volume of 750 μL. Three days later, 750 μL of RPMI with 5% human AB serum+NEAA, containing 200 ng/mL human M-CSF+20 ng/mL human IL-4, was added to each well, and the plate was incubated for four more days. On day seven, the cells were transfected using Viromer® RED transfection reagent, according to the manufacturer's instructions. 500 ng of plasmid DNA from a panel of STING GOF mutants, including the modified chimeric STING proteins, as well as untransfected control, were diluted in the provided buffer, and mixed with Viromer® RED transfection reagent, and incubated at room temperature for 15 minutes to allow the DNA/Viromer® RED complexes to form. As a positive control, the STING agonist 3′5′ RpRp c-di-AMP (InvivoGen), an analog of the clinical compound ADU-S100, was added to the cells at a concentration of 10 μg/mL. The DNA/Viromer® RED complexes then slowly were added to each well of the 24-well plate (in triplicate), and the plate was incubated for 48 hours at 37° C., in a CO₂ incubator.

[1532] The cells were harvested for qPCR 48 hours post-transfection, and were lysed with 350 μL Buffer RLT lysis buffer with beta-mercaptoethanol (Qiagen). RNA extraction was performed using the Qiagen RNeasy® Plus Mini Kit, with the following modifications. A genomic DNA elimination step, using an RNase-Free DNase kit (Qiagen), was included in the kit to remove genomic DNA from the total RNA. Total RNA concentration was measured using a NanoDrop™ One^{C} UV-Vis Spectrophotometer (Thermo Fisher Scientific). The purity of each sample also was assessed from the A₂₆₀/A₂₃₀ absorption ratio. RNA was stored at −80° C. without freeze-thawing, until reverse-transcription was performed.

[1533] Synthesis of cDNA was performed from 0.5-1 μg of template RNA, using a CFX96™ Real-Time System (Bio-Rad) and iScript™ Reverse Transcription Supermix for RT-qPCR (Bio-Rad) in a 20 μL reaction, according to the manufacturer's instructions. qPCR was performed with a CFX96™ Real-Time System (Bio-Rad). Primers for human IFNβ1 (huIFNβ1; Assay ID: qHsaCEP0054112; Bio-Rad) and for huIL-6 (Assay ID: qHsaCEP0051939; Bio-Rad) were used for the qPCR. The qPCR reaction (20 μL) was conducted per protocol, using either the SsoAdvanced™ Universal SYBR® Green Supermix, or the iQ™ Multiplex Powermix (Bio-Rad). The standard thermocycling program on the Bio-Rad CFX96™ Real-Time System comprised a 95° C. denaturation step for 150 seconds, followed by 39 cycles of 95° C. for 15 seconds, and 60° C. for 55 seconds. Quantification of the target mRNA was normalized using actin reference mRNA (Bio-Rad, Assay ID: qHsaCEP0036280). ΔC_{q} was calculated as the difference between target (huIFNs or huIL-6) and reference (actin) gene. ΔΔC_{q} was obtained by normalizing the ΔC_{q} values of the treatments (transfections), to the ΔC_{q} values of the non-treatment (i.e., untransfected) controls. The ratios of the IFNs ΔΔC_{q} to the IL-6 ΔΔC_{q} are shown in the table below.

[1534] The results, which are summarized in the table below, show that, of all of the STING GOF mutants screened, the huSTING N54S/R284G tazCTT variant results in the highest ratio of immunostimulatory IFN-β to pro-inflammatory IL-6 expression. Additionally, the chimeric STING constructs, containing a replacement of the CTT of human STING with the CT of Tasmanian devil STING (e.g., huSTING tazCTT), generally induced higher ratios of IFN-β to IL-6 expression than the corresponding fully human STING constructs comprising the same GOF mutation(s).

[1535] Increased expression of IFN-β indicates increased IRF3/type I IFN signaling, which is immunostimulatory and beneficial, while decreased IL-6 expression is indicative of reduced NF-κB signaling, which is pro-inflammatory and does not contribute to an anti-tumor response. A higher ratio of IFN-β to IL-6 expression is indicative of an increased anti-tumor/anti-viral type response, and a decreased pro-inflammatory response. Thus, replacement of the CTT, as well as the gain-of-function mutations, in a STING protein, increases the anti-tumor activity of the STING protein, and, hence, the immunostimulatory bacterium.

Ratio of IFN-β to IL-6 Gene Expression Following Transfection of M2 Macrophages with STING Variants

| | Mean Ratio of IFN-β to | Standard |
|---|---|---|
| STING Variant | IL-6 Gene Expression | Deviation |
| Untransfected control | 1.00 | 0.00 |
| STING Agonist (3′5′ RpRp c-di-AMP) | 4.00 | ±4.24 |
| NanoLuc ® Plasmid Control | 16.00 | ±2.83 |
| huSTING WT | 33.00 | ±27.84 |
| huSTING V147L | 7.00 | ±3.46 |
| huSTING N154S | 16.33 | ±11.24 |
| huSTING V155M | 14.00 | ±4.58 |
| huSTING C206Y | 19.00 | ±2.65 |
| huSTING R281Q | 21.33 | ±18.61 |
| huSTING R284S | 6.33 | ±4.93 |
| huSTING R284H | 6.33 | ±2.52 |
| huSTING R284M | 7.33 | ±0.58 |
| huSTING R284G | 9.67 | ±2.52 |
| huSTING V155M/C206Y | 10.67 | ±1.53 |
| huSTING N154S/C206Y | 11.00 | ±6.56 |
| huSTING C206Y/R284G | 11.00 | ±8.19 |
| huSTING V155M/R284G | 10.67 | ±4.93 |
| huSTING N154S/R284G | 48.00 | ±10.39 |
| huSTING WT tazCTT | 16.67 | ±10.41 |
| huSTING V147L tazCTT | 23.00 | ±1.00 |
| huSTING N154S tazCTT | 19.00 | ±6.08 |
| huSTING V155M tazCTT | 22.67 | ±4.16 |
| huSTING C206Y tazCTT | 14.67 | ±7.51 |
| huSTING R281Q tazCTT | 10.67 | ±3.51 |
| huSTING R284S tazCTT | 23.00 | ±8.89 |
| huSTING R284H tazCTT | 31.33 | ±13.43 |
| huSTING R284M tazCTT | 43.00 | ±14.93 |
| huSTING R284G tazCTT | 38.33 | ±12.01 |
| huSTING V155M/C206Y tazCTT | 31.00 | ±15.72 |
| huSTING N154S/C206Y tazCTT | 26.67 | ±11.59 |
| huSTING C206Y/R284G tazCTT | 40.67 | ±14.01 |
| huSTING V155M/R284G tazCTT | 31.33 | ±10.60 |
| huSTING N154S/R284G tazCTT | 108.33 | ±50.90 |

### Example 23

### Design of IL-15 Receptor-α and IL-15 Single-Chain Fusion Proteins

[1536] Fusion proteins, containing human proteins or mouse proteins, were prepared. The mouse proteins are for use in mouse models; the human proteins are for encoding in the immunostimulatory bacteria to be used as human therapeutics.

[1537] A human IL-15 Receptor-α (IL-15Rα) fused to a human IL-15 single-chain (sc) was designed, as follows. Amino acid residues 1-108 of human IL-15Rα (SEQ ID NO:401), which correspond to the leader sequence and sushi domain of IL-15-Rα (plus an additional 13 amino acid residues of IL-15Rα; see, e.g., Bouchaud et al. (2008) J. Mol. Biol. 382(1):1-12) were added in-frame with a Gly-Ser linker that has four repeats of the sequence Gly-Gly-Gly-Gly-Ser (i.e., (GGGGS)₄). The polypeptide sequence corresponding to fully mature human IL-15sc, without the leader sequence or propeptide, and corresponding to amino acid residues 48-162 of SEQ ID NO:403, was added following the linker. The sequence of the resulting human IL-15Rα-IL-15sc fusion protein (SEQ ID NO:404) is as follows:

MAPRRARGCRTLGLPALLLLLLLRPPATRGITCPPPMSVEHADIWVKSY
SLYSRERYICNSGFKRKAGTSSLTECVLNKATNVAHWTTPSLKCIRDPA
LVHQRPAPPSGGGGSGGGGSGGGGSGGGGSANWVNVISDLKKIEDLIQS
MHIDATLYTESDVHPSCKVTAMKCFLLELQVISLESGDASIHDTVENLI
ILANNSLSSNGNVTESGCKECEELEEKNIKEFLQSFVHIVQMFINTS,

where the residues corresponding to residues 1-108 of human IL-15Rα are underlined; the Gly-Ser linker is in bold letters; and the residues corresponding to residues 48-162 of human IL-15 are double underlined.

[1538] Similarly, a murine IL-15Rα-IL-15sc fusion protein (SEQ ID NO:407) was prepared by fusion of a portion of the murine IL-15 Receptor-α (IL-15Rα) protein to a portion of the murine IL-15 single-chain (sc) protein. Amino acid residues 1-132 of murine IL-15Rα (SEQ ID NO:405), which include the leader sequence and sushi domain of IL-15-Rα, were added in-frame with a (GGGGS)₄ linker. The polypeptide sequence corresponding to fully mature murine IL-15sc, without the leader sequence or propeptide, and corresponding to amino acid residues 49-162 of SEQ ID NO:406, was added following the linker. The sequence of the resulting murine IL-15Rα-IL-15sc fusion protein (SEQ ID NO:407), which was used for mouse model experiments, is as follows:

MASPQLRGYGVQAIPVLLLLLLLLLLPLRVTPGTTCPPPVSIEHADIRV
KNYSVNSRERYVCNSGFKRKAGTSTLIECVINKNTNVAHWTTPSLKCIR
DPSLAHYSPVPTVVTPKVTSQPESPSPSAKEPEAGGGGSGGGGSGGGGS
GGGGSNWIDVRYDLEKIESLIQSIHIDTTLYTDSDFHPSCKVTAMNCFL
LELQVILHEYSNMTLNETVRNVLYLANSTLSSNKNVAESGCKECEELEE
KTFTEFLQSFIRIVQMFINTS,

where the residues corresponding to residues 1-132 of murine IL-15Rα are underlined; the Gly-Ser linker is in bold letters; and the residues corresponding to residues 49-162 of murine IL-15 are double underlined.

### Example 24

### IL-15Rα-IL-15sc Induces Curative Effects and Protection from Tumor Re-Challenge in a Mouse Model of Colorectal Carcinoma

[1539] This example demonstrates that immunostimulatory bacteria that encode the IL-15Rα-IL15sc fusion protein (also referred to herein as IL-15/IL-15R alpha chain complex, IL-15/IL-15Rα chain complex, and IL-15/IL-15Rα) induce anti-tumor efficacy as a monotherapy. To demonstrate this, S. typhimurium strains, containing plasmids encoding murine IL-15Rα-IL15sc (muIL-15Rα-IL15sc), were prepared. The YS1646Δasd/ΔFLG/ΔpagP/ΔansB/ΔcsgD strain, containing the plasmid encoding muIL-15Rα-IL15sc (i.e., YS1646Δasd/ΔFLG/ΔpagP/ΔansB/ΔcsgD-muIL-15Rα-IL15sc; mouse IL-15Rα-IL15sc was used for the experiments performed in the mouse model), was compared to PBS control, for safety and efficacy in the subcutaneous (SC) flank MC38 colorectal adenocarcinoma model. For this study, 6-8 week-old female C57BL/6 mice (5 mice per group) were inoculated SC in the right flank with MC38 cells (5×10⁵ cells in 100 μL PBS). Mice bearing established flank tumors were intravenously (IV) injected on day 8 with 2×10⁷ CFUs of the YS1646Δasd/ΔFLG/ΔpagP/ΔansB/ΔcsgD-muIL-15Rα-IL15sc strain, or with PBS vehicle control. Tumor measurements and body weights were recorded twice weekly.

[1540] The results showed that the YS1646Δasd/ΔFLG/ΔpagP/ΔansB/ΔcsgD-muIL-15Rα-IL15sc strain demonstrated 50% cures (4/8 vs. 0/8 for PBS, p=0.005, day 21), after a single IV injection. At 66 days post-tumor implantation (day 57 post-IV dosing), cured mice (N=4) were re-implanted, on the opposite flank, with 5×10⁵ MC38 cells, and tumor growth was compared to naïve, age-matched mice (N=5). By day 30 post re-implantation, all mice in the group cured with strain YS1646Δasd/ΔFLG/ΔpagP/ΔansB/ΔcsgD-muIL-15Rα-IL15sc remained tumor-free, whereas all mice in the naïve group had reached maximum tumor volume. These data demonstrate the potent and curative effects of delivery of the IL-15Rα-IL15sc fusion protein via an immunostimulatory bacterium, such as strain YS1646Δasd/ΔFLG/ΔpagP/ΔansB/ΔcsgD-muIL-15Rα-IL15sc, and demonstrate the induction of durable protective immune memory in a model of colorectal carcinoma.

### Example 25

### Anti-CTLA-4 scFv-Fc Demonstrates Superior Blockade of the CD80/CTLA-4 and CD86/CTLA-4 Interactions Compared to Anti-CTLA-4 scFv

[1541] An scFv-Fc specific for human CTLA-4 (see, SEQ ID NOs:427 and 428 for the nucleic acid and protein sequences, respectively) was designed using the amino acid sequence of ipilimumab. Ipilimumab (YERVOY®) is a fully human IgG1κ monoclonal antibody that specifically binds human CTLA-4 (see, e.g., the antibody designated 10D1 in U.S. Patent Publication No. 2002/0086014 and in U.S. Pat. No. 6,984,720), blocking CTLA-4's immune inhibiting interaction with CD80 (also known as B7.1 or B7-1) and CD86 (also known as B7.2 or B7-2).

[1542] To generate the ipilimumab scFv antibody fragment (see, SEQ ID NO:429), the variable light chain (V_{L}) and variable heavy chain (V_{H}) of ipilimumab were linked with a 20 amino acid long glycine-serine (GS) linker ((GGGGS)₄; see, SEO ID NO:555). To generate the scFv-Fc antibody fragment (see, SEQ ID NO:428), the variable heavy chain of the ipilimumab scFv was linked to a human IgG1 Fc, containing a mutation of the free cysteine in the hinge region to a serine (at position 272 in SEQ ID NO:428: see. SEO ID NO:556). The leader sequence (METPAQLLFLLLLWLPDTTG; corresponding to residues 1-20 in SEQ ID NO:428) was derived from the sequence of the human immuno-globulin kappa variable 3-20 (IGKV3-20) protein. The sequence was codon optimized using the GenScrip GenSmart™ Codon Optimization tool.

[1543] The neutralizing ability of the anti-CTLA-4 scFv-Fc was compared to that of the anti-CTLA-4 scFv (lacking the human IgG1 Fc portion), using competitive ELISAs to measure the ability of each of the antibody fragments to block the interactions between CTLA-4 and its ligands, CD80 and CD86. HEK293T cells were transfected with 3 micrograms of DNA encoding the anti-CTLA-4 scFv-Fc or the anti-CTLA-4 scFv antibody fragment constructs, using the FuGENE® transfection reagent (Promega), at the proper reagent:DNA ratios. Forty-eight hours post-transfection, HEK293T cell-free culture supernatants were harvested, filtered, and used in a competitive ELISA to assess the blockade activity of the anti-CTLA-4 antibody fragments.

[1544] For the competitive ELISAs, mouse CD80 or CD86 recombinant proteins (R&D Systems) were coated overnight at 4° C. on a high protein-binding 96-well plate, at a concentration of 100 ng/ml. The wells were then washed one time with PBS 0.05% Tween-20, and the wells were blocked with ELISA blocking buffer for 1 hour at room temperature. The wells were then washed one time with PBS 0.05% Tween-20. HEK293T cell culture supernatants, containing each of the anti-CTLA-4 antibody fragments, were mixed with 10 ng/ml of a recombinant murine CTLA-4-human IgG1 Fc chimera (R&D Systems), and added to the wells and incubated for 2 hours at room temperature. The wells were then washed three times with PBS 0.05% Tween-20, and horseradish peroxidase (HRP)-conjugated anti-human IgG1 antibody was added to the wells (Jackson ImmunoResearch), and incubated for one hour at room temperature. The wells were then washed three times with PBS 0.05% Tween-20, and detection reagent (3,3′,5,5′-tetramethylbenzidine (TMB), Thermo Fisher Scientific) was added to the wells. The enzymatic reaction was stopped with sulfuric acid (BioLegend), and the optical densities were read at 450 nm.

[1545] The results of the competitive ELISAs are summarized in the table below. The anti-CTLA-4 scFv-Fc blocked the binding of CTLA-4 to CD86 by 75.5%, and blocked the binding of CTLA-4 to CD80 by 40.6%, whereas the anti-CTLA-4 scFv blocked the binding of CTLA-4 to CD86 by 32.5%, and blocked the binding of CTLA-4 to CD80 by 7%. A higher degree of CD86/CTLA-4 blocking activity (compared with CD80/CTLA-4 blocking activity) was observed with both antibody fragments, and a superior neutralizing activity was observed with the anti-CTLA-4 scFv-Fc, when compared to the anti-CTLA-4 scFv.

### Competitive ELISA Results

| Anti-CTLA-4 | % CD86 | % CD80 |
|---|---|---|
| Antibody | Blockade | Blockade |
| Fragment | Activity | Activity |
| Anti-CTLA-4 scFv | 32.5 | 7.0 |
| Anti-CTLA-4 scFv-Fc | 75.5 | 40.6 |

[1547] An anti-murine CTLA-4 scFv (SEQ ID NO:430) and anti-murine CTLA-4 scFv-Fc (SEQ ID NO:431), derived from the 9D9 clone, also were prepared, as discussed above for the corresponding human anti-CTLA-4 antibody fragments. The scFv contains an IgK leader mouse sequence, and the V_{L} and V_{H} domains from clone 9D9, linked via a (Gly₄Ser)₃ linker. The scFv-Fc also contains a mouse IgG2a Fc linked to the V_{H} domain.

[1548] Included among the immunostimulatory bacteria provided herein, are those that encode, on the plasmid, anti-CTLA-4 antibodies and fragments thereof, including the anti-CTLA-4 scFv antibody fragments and the anti-CTLA-4 scFv-Fc antibody fragments, as provided herein, as well as combinations with nucleic acid molecules encoding other therapeutic products.

### Example 26

### Optimized Expression Cassettes for High-Level, Multiplexed Expression of Encoded Therapeutic Products

[1549] Elements, known as Internal Ribosomal Entry Sites (IRES), can promote protein translation by enhancing ribosomal binding and stabilization of mRNA through mimicking the 5′mRNA cap. IRES elements from viruses and mammalian cells are well-known. Of these, an endogenous human IRES, known as Vascular Endothelial Growth Factor and Type 1 Collagen Inducible Protein (VCIP), previously was demonstrated to enhance expression from a bicistronic vector, encoding Firefly and Renilla luciferases, where the Renilla luciferase, which was the downstream gene (i.e., encoded after the VCIP IRES), was expressed in vitro and in vivo, without the need for a second promoter (see, e.g., Licursi et al. (2011) Gene Therapy 18(6):631-636).

[1550] Plasmids containing combinations of human or mouse IL-15Rα-IL-15sc and huSTING N154S/R284G tazCTT, or human or mouse IL-15Rα-IL-15sc, huSTING N154S/R284G tazCTT, and an anti-CTLA-4 scFv-Fc, where the bicistronic and polycistronic constructs contain 2A peptides, were tested for expression of each encoded payload/product against single expresser controls. Additionally, combination constructs, containing the VCIP IRES, also were tested.

[1551] HEK293T STING Null Cells (293-Dual™ Null Cells; InvivoGen) were used, which do not contain endogenous STING, and express secreted embryonic alkaline phosphatase (SEAP), placed under the control of the endogenous IFN-stimulated response element (ISRE) promoter, where the coding sequence of ISRE is replaced by the SEAP ORF using knock-in technology. STING activity can thus be assessed by monitoring type I IFN induced SEAP production. The 293-Dual™ Null cells also express Lucia™ luciferase, a secreted luciferase, placed under the control of the endogenous IFN-β promoter; the coding sequence of IFN-β has been replaced by the Lucia™ luciferase ORF using knock-in technology. This allows for the assessment of STING activity by monitoring the expression of IFN-β. Using these cells, STING activity can be assessed by monitoring ISRE-induced SEAP production and/or IFN-β-dependent expression of Lucia™ luciferase. The two reporter proteins, SEAP and Lucia™ Luciferase, can be measured in the cell supernatant using standard assays and detection reagents, such as the QUANTI-Blue™ and QUANTI-Luc™ detection reagents (InvivoGen), respectively.

[1552] The cells were seeded in 24-well plates coated with poly-L-lysine at 200,000 cells per well, and incubated overnight at 37° C. in a 5% CO₂ incubator, to achieve 80% confluency. The following day, 300 ng of each plasmid DNA, and 40 ng of a CMV-GFP vector (i.e., a vector encoding green fluorescent protein under the control of a CMV promoter), were diluted in serum-free media and added to FuGENE® transfection reagent (Promega), at the proper reagent:DNA ratios, with untransfected wells serving as negative controls (in duplicates). Cell culture supernatants from each sample were collected 48 hours post-transfection.

[1553] The STING activity of the huSTING N154S/R284G tazCTT variant was evaluated using the ISRE-SEAP and IFN-β-Lucia™ reporter systems. The type I interferon (IFN) activity (induced by STING) was assessed by monitoring type I IFN-stimulated SEAP production in the cell supernatants. 20 μL of cell culture supernatant was added to 180 μL of QUANTI-Blue™ reagent (InvivoGen), which is used for measuring SEAP. Type I interferon activation was determined by measuring ISRE-induced SEAP activity on a SpectraMax® M3 Spectrophotometer (Molecular Devices), at an absorbance wavelength of 650 nm. The type I interferon (IFN) activity (induced by STING) also was assessed by monitoring the type I IFN-stimulated Lucia™ luciferase production in the cell supernatants. 20 μL of cell culture supernatant was added to 50 μL of QUANTI-Luc™ reagent (InvivoGen), which is used for measuring Lucia™ luciferase activity. Type I interferon activation was determined by measuring IFNβ-induced Lucia™ luciferase activity on a SpectraMax® M3 Spectrophotometer (Molecular Devices), on the luminescence setting.

[1554] Cell culture supernatants also were assessed for the expression of human or mouse IL-15Rα-IL-15sc (see, Example 23), and for the expression of human or mouse anti-CTLA-4 scFv-Fc (see, Example 25). For the muIL-15Rα-IL-15sc constructs, the murine IL-15Rα-IL-15sc ELISA (R&D) was used, per kit instructions. For the huIL-15Rα-IL-15sc constructs, the human IL-15Rα-IL-15sc ELISA (R&D) was used, per kit instructions. Direct ELISAs, with human and mouse CTLA-4-Fc (R&D Systems), were performed on the cell culture supernatants of cells transfected with plasmids encoding anti-human CTLA-4 scFv-Fc and anti-murine CTLA-4 scFv-Fc, to measure the expression levels of these proteins.

[1555] GFP production was detected by flow cytometry, and was used to normalize the transfections to each other. 48 hours post-transfection, the cells were washed twice with PBS+2% FBS by centrifugation at 1300 RPM for 3 minutes. The cells then were resuspended in PBS+2% FBS with DAPI (dead/live stain). Flow cytometry data were acquired using the ACEA NovoCyte® flow cytometer (ACEA Biosciences, Inc.), and analyzed using the FlowJo™ software (Tree Star, Inc.).

[1556] As shown in the table below, all constructs containing the huSTING N154S/R284G tazCTT variant displayed ISRE-SEAP reporter activity and IFNβ-Lucia™ luciferase reporter activity. The construct designated 2.1 CMV VCIP muIL-15Rα-IL-15sc T2A huSTING N154S/R284G tazCTT, which contains the VCIP IRES and a T2A peptide for expression of the combination of muIL-15Rα-IL-15sc and huSTING N154S/R284G tazCTT, results in the highest expression levels of muIL-15Rα-IL-15sc, when normalized by GFP co-transfection. Similarly, the construct designated 2.1 CMV VCIP huIL-15Rα-IL-15sc T2A huSTING N154S/R284G tazCTT, which contains the VCIP IRES and a T2A peptide for expression of the combination of huIL-15Rα-IL-15sc and huSTING N154S/R284G tazCTT, results in the highest expression levels of huIL-15Rα-IL-15sc, when normalized by GFP co-transfection. The construct designated 1.76 CMV mu anti-CTLA-4 scFv-Fc results in the highest level of expression of the murine anti-CTLA-4 scFv-Fc, and the construct designated 1.76 CMV hu anti-CTLA-4 scFv-Fc results in the highest level of expression of the human anti-CTLA-4 scFv-Fc, when normalized by GFP co-transfection.

Measurement of STING Activity, IL-15Rα-IL-15c Concentration, and Anti-CTLA-4 scFv-Fc Concentration, Normalized by GFP Co-Transfection, in HEK293T STING Null Cells

Mouse

| | | | | | muIL-15Rα- | | mu anti-CTLA-4 | |
|---|---|---|---|---|---|---|---|---|
| | ISRE-SEAP | | IFNβ-Lucia ™ | | IL-15sc | | scFv-Fc | |
| | (Abs) | | (RLUs) | | (Abs) | | (Abs) | |
| Construct | Mean | ±SD | Mean | ±SD | Mean | ±SD | Mean | ±SD |
| Untransfected | 0 | 0 | 0 | 0 | 0 | 0 | 0 | 0 |
| 1.76 CMV β- | −1.71E−05 | 1.04E−05 | −0.01597 | 0.6049 | 0 | 0 | 0.002325 | 0.0004565 |
| Actin | | | | | | | | |
| 1.76 CMV | 1.45E−07 | 4.79E−06 | 0.07555 | 0.3292 | 947.4 | 164.1 | NA* | NA* |
| muIL-15Rα- | | | | | | | | |
| IL-15sc | | | | | | | | |
| 1.76 CMV | 4.07E−02 | 4.29E−03 | 18.25 | 1.27 | NA | NA | NA* | NA* |
| huSTING | | | | | | | | |
| N154S/R284G | | | | | | | | |
| tazCTT | | | | | | | | |
| 1.76 CMV | 3.79E−02 | 2.19E−04 | 28.47 | 1.523 | 996.8 | 364.6 | NA* | NA* |
| muIL-15Rα- | | | | | | | | |
| IL-15sc T2A | | | | | | | | |
| huSTING | | | | | | | | |
| N154S/R284G | | | | | | | | |
| tazCTT | | | | | | | | |
| 2.1 CMV | 4.73E−02 | 7.60E−03 | 7.145 | 0.8812 | 1636 | 287.9 | NA* | NA* |
| VCIP muIL- | | | | | | | | |
| 15Rα-IL-15sc | | | | | | | | |
| T2A | | | | | | | | |
| huSTING | | | | | | | | |
| N154S/R284G | | | | | | | | |
| tazCTT | | | | | | | | |
| 1.76 CMV mu | −1.54E−06 | 1.81E−05 | −0.6844 | 0.1614 | NA* | NA* | 0.03733 | 0.003862 |
| anti-CTLA-4 | | | | | | | | |
| scFv-Fc | | | | | | | | |
| 1.76 CMV mu | 3.51E−02 | 1.85E−04 | 3.225 | 0.2805 | 599.6 | 190.4 | 0.01676 | 0.00193 |
| anti-CTLA-4 | | | | | | | | |
| scFv-Fc T2A | | | | | | | | |
| muIL-15Rα- | | | | | | | | |
| IL-15sc P2A | | | | | | | | |
| huSTING | | | | | | | | |
| tazCTT | | | | | | | | |
| N154S/R284G | | | | | | | | |
| tazCTT | | | | | | | | |
| 2.1 CMV | 3.62E−02 | 1.26E−03 | 4.836 | 0.5915 | 610.1 | 230.7 | 0.01461 | 0.002674 |
| VCIP mu anti- | | | | | | | | |
| CTLA-4 scFv- | | | | | | | | |
| Fc T2A muIL- | | | | | | | | |
| 15Rα-IL-15sc | | | | | | | | |
| P2A | | | | | | | | |
| huSTING | | | | | | | | |
| N154S/R284G | | | | | | | | |
| tazCTT | | | | | | | | |

Human

| | | | | | huIL-15Rα- | | hu anti-CTLA-4 | |
|---|---|---|---|---|---|---|---|---|
| | ISRE-SEAP | | IFN β-Lucia ™ | | IL-15sc | | scFv-Fc | |
| | (Abs) | | (RLUs) | | (Abs) | | (Abs) | |
| Construct | Mean | ±SD | Mean | ±SD | Mean | ±SD | Mean | ±SD |
| Untransfected | 0 | 0 | 0 | 0 | 0 | 0 | 0 | 0 |
| 1.76 CMV β- | −1.71E−05 | 1.04E−05 | −0.01597 | 0.6049 | 0 | 0 | 0.001643 | 0.00007734 |
| Actin | | | | | | | | |
| 1.76 CMV | −1.18E−05 | 9.34E−06 | 0.03296 | 0.1661 | 2407 | 4.101 | NA* | NA* |
| huIL-15Rα- | | | | | | | | |
| IL-15sc | | | | | | | | |
| 1.76 CMV | 4.07E−02 | 4.29E−03 | 18.25 | ±1.27 | NA* | NA* | NA* | NA* |
| huSTING | | | | | | | | |
| N154S/R284G | | | | | | | | |
| tazCTT | | | | | | | | |
| 1.76 CMV | 4.27E−02 | 3.76E−03 | 10.5 | 0.7221 | 1439 | 869.4 | NA* | NA* |
| huIL-15Rα- | | | | | | | | |
| IL-15sc T2A | | | | | | | | |
| huSTING | | | | | | | | |
| N154S/R284G | | | | | | | | |
| tazCTT | | | | | | | | |
| 2.1 CMV | 4.18E−02 | 4.63E−03 | 12.79 | 1.151 | 2758 | 235.1 | NA* | NA* |
| VCIP huIL- | | | | | | | | |
| 15Rα-IL-15sc | | | | | | | | |
| T2A | | | | | | | | |
| huSTING | | | | | | | | |
| N154S/R284G | | | | | | | | |
| tazCTT | | | | | | | | |
| 1.76 CMV hu | −8.73E−06 | 5.53E−06 | −0.333 | 0.04487 | NA* | NA* | 0.06436 | 0.006539 |
| anti-CTLA-4 | | | | | | | | |
| scFv-Fc | | | | | | | | |
| 1.76 CMV hu | 3.80E−02 | 1.32E−03 | 6.962 | 0.01366 | 2071 | 557.5 | 0.02265 | 0.001188 |
| anti-CTLA-4 | | | | | | | | |
| scFv-Fc T2A | | | | | | | | |
| huIL-15Rα- | | | | | | | | |
| IL-15sc P2A | | | | | | | | |
| huSTING | | | | | | | | |
| N154S/R284G | | | | | | | | |
| tazCTT | | | | | | | | |
| 2.1 CMV | 3.53E−02 | 3.25E−03 | 7.12 | 1.998 | 936.3 | 149.4 | 0.01687 | 0.0007017 |
| VCIP hu anti- | | | | | | | | |
| CTLA-4 scFv- | | | | | | | | |
| Fc T2A huIL - | | | | | | | | |
| 15Rα-IL-15sc | | | | | | | | |
| P2A | | | | | | | | |
| huSTING | | | | | | | | |
| N154S/R284G | | | | | | | | |
| tazCTT | | | | | | | | |

SD = Standard deviation
*NA = Not applicable

### Example 27

### Expression Plasmids Encoding the Combination of huIL-15Rα-IL-15sc+huSTING N154S/R284G tazCTF

[1557] To identify the plasmid(s), with the highest expression of huIL-15Rα-IL-15sc and huSTING N154S/R284G tazCTT, plasmids containing nucleic acid molecules encoding huIL-15Rα-IL-15sc and/or huSTING N154S/R284G tazCTT, with different 2A peptides (e.g., T2A or P2A), and/or different post-transcriptional regulatory elements (e.g., HPRE or WPRE), and/or different poly(A) tails (e.g., bovine growth hormone poly(A) (bGHpA) or simian virus 40 poly(A) (SV40pA)), and/or containing the VCIP IRES, were cloned. Additionally, in some constructs, short peptide spacers, including RRKR and RAKR, and other spacers of different lengths, were encoded following the nucleic acid encoding the first payload (i.e., huIL-15Rα-IL-15sc), and before the nucleic acid encoding the 2A peptide. RRKR and RAKR are designed furin protease cleavage sites, and were placed in that position to facilitate proper processing of the 2A peptide sequences. The plasmids were first evaluated for expression and functionality by transfection in HEK293T STING Null Cells (ISG/KI-IFN β) cells (InvivoGen).

[1558] HEK293T STING Null Cells (293-Dual™ Null Cells (ISG-SEAP/KI-[IFN-β]Lucia; InvivoGen), which do not contain endogenous STING, and express secreted embryonic alkaline phosphatase (SEAP), placed under the control of the endogenous IFN-stimulated response element (ISRE) promoter, where the coding sequence of ISRE is replaced by the SEAP ORF using knock-in technology, were used. As discussed above, the 293-Dual™ Null cells also express Lucia™ luciferase, a secreted luciferase, placed under the control of the endogenous IFN-β promoter, where the coding sequence of IFN-β has been replaced by the Lucia™ luciferase ORF using knock-in technology. The cells were seeded in 24-well plates coated with poly-L-lysine, at 200,000 cells per well, and incubated overnight at 37° C. in a 5% CO₂ incubator, to achieve 80% confluency. The following day, 300 ng of each plasmid DNA, and 40 ng of a CMV-GFP vector, were diluted in serum-free media and added to FuGENE® transfection reagent (Promega), at the proper reagent:DNA ratios, with untransfected wells serving as negative controls (in duplicates). Cell culture supernatants from each sample were collected 48 hours post-transfection for analysis.

[1559] The STING activity of the huSTING N154S/R284G tazCTT modified STING protein was evaluated with the HEK293T STING Null (ISG-SEAP/KI-[IFN-β]Lucia) reporter cell line (InvivoGen). Using these cells, the type I interferon (IFN) activity (that is induced by STING) is assessed by monitoring type I IFN-stimulated Lucia™ luciferase production in the cell supernatants. IFNβ induction is measured with the IFNβ-Lucia reporter. 20 μL of cell culture supernatant was added to 50 μL of QUANTI-Luc™ reagent (InvivoGen), which is used for measuring Lucia™ luciferase activity. Type I interferon activation was determined by measuring IFNβ-induced Lucia™ luciferase activity on a SpectraMax® M3 Spectrophotometer (Molecular Devices), on the luminescence setting. Cell culture supernatants also were assessed for the expression of human IL-15Rα-IL-15sc by ELISA (R&D), per kit instructions.

[1560] GFP was detected by flow cytometry, and the expression levels of GFP (as measured by fluorescence) were used to normalize the transfections to one other. 48 hours post-transfection, the cells were washed twice with PBS+2% FBS by centrifugation at 1300 RPM for 3 minutes. The cells then were resuspended in PBS+2% FBS with DAPI (dead/live stain). Flow cytometry data were acquired using the ACEA NovoCyte® flow cytometer (ACEA Biosciences, Inc.), and analyzed using the FlowJo™ software (Tree Star, Inc.).

[1561] As shown in the two tables below, the plasmid construct designated 2.1 CMV VCIP huIL-15Rα-IL-15sc T2A huSTING N154S/R284G tazCTT HPRE bGHpA resulted in the highest normalized luminescence value from the IFNβ-Lucia™ reporter (see, first table below), and also, the highest normalized concentration of expressed huIL-15Rα-IL-15sc, as determined by ELISA (see, second table below).

[1562] As shown in the first table below, the construct encoding only huIL-15Rα-IL-15sc (and no STING variant), as expected, does not exhibit STING-induced type I IFN activity. The construct encoding only the huSTING N154S/R284G tazCTT exhibits a high level of STING-induced type I IFN activity. For the constructs encoding both payloads, the combination of a P2A peptide with WPRE results in higher levels of STING activity (i.e., higher levels of expression of STING), than combinations of T2A and P2A with HPRE, or T2A with WPRE. Additionally, higher levels of STING activity were observed with constructs containing a bGH poly(A) tail, than an SV40 poly(A) tail. The addition of a short peptide spacer, such as RAKR or RRKR, slightly increases the level of STING activity, compared to the same constructs not containing these spacers. In certain constructs, such as those designated 2.1 CMV VCIP huIL-15Rα-IL-15sc T2A huSTING N154S/R284G tazCTT HPRE bGHpA; 2.1 CMV VCIP huIL-15Rα-IL-15sc P2A huSTING N154S/R284G tazCTT HPRE bGHpA; 2.1 CMV VCIP huIL-15Rα-IL-15sc T2A huSTING N154S/R284G tazCTT WPRE bGHpA; 2.1 CMV VCIP huIL-15Rα-IL-15sc T2A huSTING N154S/R284G tazCTT WPRE SV40 pA; and 2.1 CMV VCIP huIL-15Rα-IL-15sc RAKR-T2A huSTING N154S/R284G tazCTT HPRE bGHpA, the addition of a VCIP IRES increases the levels of STING activity, compared to the same constructs not containing the VCIP IRES.

[1563] As shown in the second table below, the expression levels of huIL-15Rα-IL-15sc are higher from constructs containing a bGH poly(A) tail, than an SV40 poly(A) tail, and in general, constructs containing WPRE result in higher expression levels of huIL-15Rα-IL-15sc than the same constructs containing HPRE. The addition of an RAKR short peptide spacer, after the nucleic acid sequence encoding huIL-15Rα-IL-15sc, in the construct encoding CMV huIL-15Rα-IL-15sc T2A huSTING N154S/R284G tazCTT HPRE bGHpA, increased the expression levels of huIL-15Rα-IL-15sc. In all constructs, except the one designated 2.1 CMV VCIP huIL-15Rα-IL-15sc P2A huSTING N154S/R284G tazCTT HPRE SV40 pA, the addition of a VCIP IRES (in addition to a 2A peptide) upstream of the construct, results in significantly increased expression of huIL-15Rα-IL-15sc. Replacement of the 2A peptide with a VCIP IRES, for example, in the construct designated 1.76 CMV huIL-15Rα-IL-15sc VCIP huSTING N154S/R284G tazCTT HPRE bGHpA, results in similar expression levels of huIL-15Rα-IL-15sc. Replacement of the 2A peptide with a VCIP IRES, and the addition of a longer spacer between the nucleic acids encoding huIL-15Rα-IL-15sc and the VCIP IRES, for example, in the construct designated 1.76 CMV huIL-15Rα-IL-15sc Longer spacer VCIP huSTING N154S/R284G tazCTT HPRE bGHpA, results in a significantly increased expression level of huIL-15Rα-IL-15sc. The spacer sequences in the constructs are nucleic acid sequences that are placed between the stop codon of the first ORF, and the VCIP IRES upstream of the second ORF. For example the spacer, designated “New spacer” in the tables below, has the sequence ACGTCTTCTCTTTTTAAAGGACCTCGTGAAATAAAAGTGC (SEQ ID NO:408), and the spacer, designated “Longer spacer” in the tables below, has the sequence TCCGAGCCAAGTAAGGAGGTCCCTCTCTCTCTCTCCCCCCACGTCTTCTCT TTITAAAGGACCTCGTGAAATAAAAGTGC (SEQ ID NO:409).

[1564] These results indicate that the addition of a VCIP IRES generally increases the expression levels of the first payload encoded on a bicistronic construct, and increases the expression levels of the second payload in certain constructs.

STING-Induced Type I IFN Activity, as Measured by Luminescence Levels from the IFNβ-Lucia™ Reporter, and Normalized by GFP Co-Transfection, in Transfected HEK293T STING Null Cells

| | IFNß-Lucia ™ | |
|---|---|---|
| | Reporter | |
| | Luminescence (RLUs) | |
| Construct | Mean | SD |
| Untransfected control | 0 | 0 |
| 1.76 CMV huIL-15Rα-IL-15sc HPRE bGHpA | −0.7073 | ±0.05241 |
| 1.76 CMV huSTING N154S/R284G tazCTT HPRE bGHpA | 7.455 | ±0.7934 |
| 1.76 CMV huIL-15Rα-IL-15sc T2A huSTING N154S/R284G | 3.293 | ±0.8576 |
| tazCTT HPRE bGHpA | | |
| 1.76 CMV huIL-15Rα-IL-15sc P2A huSTING N154S/R284G | 3.758 | ±0.1993 |
| tazCTT HPRE bGHpA | | |
| 1.76 CMV huIL-15Rα-IL-15sc T2A huSTING | 3.867 | ±1.297 |
| N154S/R284G tazCTT WPRE bGHpA | | |
| 1.76 CMV huIL-15Rα-IL-15sc P2A huSTING | 8.716 | ±0.4241 |
| N154S/R284G tazCTT WPRE bGHpA | | |
| 1.76 CMV huIL-15Rα-IL-15sc T2A huSTING | 0.9444 | ±0.03282 |
| N154S/R284G tazCTT HPRE SV40pA | | |
| 1.76 CMV huIL-15Rα-IL-15sc P2A huSTING | 0.4778 | ±0.03872 |
| N154S/R284G tazCTT HPRE SV40pA | | |
| 1.76 CMV huIL-15Rα-IL-15sc T2A huSTING | 0.4436 | ±0.1342 |
| N154S/R284G tazCTT WPRE SV40pA | | |
| 1.76 CMV huIL-15Rα-IL-15sc P2A huSTING | 0.483 | ±0.07984 |
| N154S/R284G tazCTT WPRE SV40pA | | |
| 1.76 CMV huIL-15Rα-IL-15sc RAKR-T2A huSTING | 3.621 | ±0.5816 |
| N154S/R284G tazCTT HPRE bGHpA | | |
| 1.76 CMV huIL-15Rα-IL-15sc RRKR-T2A huSTING | 4.938 | ±0.6406 |
| N154S/R284G tazCTT HPRE bGHpA | | |
| 2.1 CMV VCIP huIL-15Rα-IL-15sc T2A huSTING | 9.356 | ±2.116 |
| N154S/R284G tazCTT HPRE bGHpA | | |
| 2.1 CMV VCIP huIL-15Rα-IL-15sc P2A huSTING | 4.065 | ±0.02317 |
| N154S/R284G tazCTT HPRE bGHpA | | |
| 2.1 CMV VCIP huIL-15Rα-IL-15sc T2A huSTING | 4.648 | ±1.199 |
| N154S/R284G tazCTT WPRE bGHpA | | |
| 2.1 CMV VCIP huIL-15Rα-IL-15sc P2A huSTING | 4.666 | ±0.8666 |
| N154S/R284G tazCTT WPRE bGHpA | | |
| 2.1 CMV VCIP huIL-15Rα-IL-15sc T2A huSTING | −0.2763 | ±0.4616 |
| N154S/R284G tazCTT HPRE SV40pA | | |
| 2.1 CMV VCIP huIL-15Rα-IL-15sc P2A huSTING | 0.2751 | ±0.2559 |
| N154S/R284G tazCTT HPRE SV40pA | | |
| 2.1 CMV VCIP huIL-15Rα-IL-15sc T2A huSTING | 0.8467 | ±0.0387 |
| N154S/R284G tazCTT WPRE SV40pA | | |
| 2.1 CMV VCIP huIL-15Rα-IL-15sc P2A huSTING | 0.3058 | ±0.3335 |
| N154S/R284G tazCTT WPRE SV40pA | | |
| 2.1 CMV VCIP huIL-15Rα-IL-15sc RAKR-T2A huSTING | 7.278 | ±0.6898 |
| N154S/R284G tazCTT HPRE bGHpA | | |
| 2.1 CMV VCIP huIL-15Rα-IL-15sc RRKR-T2A huSTING | 2.675 | ±0.2714 |
| N154S/R284G tazCTT HPRE bGHpA | | |
| 1.76 CMV huIL-15Rα-IL-15sc VCIP huSTING N154S/R284G | 0.5301 | ±0.09792 |
| tazCTT HPRE bGHpA | | |
| 1.76 CMV huIL-15Rα-IL-15sc New spacer* VCIP huSTING | 0.869 | ±0.04427 |
| N154S/R284G tazCTT HPRE bGHpA | | |
| 1.76 CMV huIL-15Rα-IL-15sc Longer spacer ** VCIP | 1.241 | ±0.03473 |
| huSTING N154S/R284G tazCTT HPRE bGHpA | | |

SD = Standard deviation
*New spacer = ACGTCTTCTCTTTTTAAAGGACCTCGTGAAATAAAAGTGC
** Longer spacer = TCCGAGCCAAGTAAGGAGGTCCCTCTCTCTCTCTCCCCCCACGTCTTCTCTTTTTAAAGGACCTCGTGAAATAAAAGTGC

Concentration of Expressed huIL-15Rα-IL-15sc, as Measured by ELISA and Normalized by GFP Co-Transfection, in Transfected HEK93T STING Null Cells

| | Fluorescence (Abs) | |
|---|---|---|
| Construct | Mean | SD |
| Untransfected control | 0 | 0 |
| 1.76 CMV huIL-15Rα-IL-15sc HPRE bGHpA | 1619 | 18.53 |
| 1.76 CMV huSTING N154S/R284G tazCTT HPRE bGHpA | 12.04 | ±35.09 |
| 1.76 CMV huIL-15Rα-IL-15sc T2A huSTING N154S/R284G | 1586 | ±88.91 |
| tazCTT HPRE bGHpA | | |
| 1.76 CMV huIL-15Rα-IL-15sc P2A huSTING N154S/R284G | 1906 | ±35.82 |
| tazCTT HPRE bGHpA | | |
| 1.76 CMV huIL-15Rα-IL-15sc T2A huSTING | 2244 | ±477 |
| N154S/R284G tazCTT WPRE bGHpA | | |
| 1.76 CMV huIL-15Rα-IL-15sc P2A huSTING | 2056 | ±71.49 |
| N154S/R284G tazCTT WPRE bGHpA | | |
| 1.76 CMV huIL-15Rα-IL-15sc T2A huSTING | 40.33 | ±9.336 |
| N154S/R284G tazCTT HPRE SV40pA | | |
| 1.76 CMV huIL-15Rα-IL-15sc P2A huSTING | 268.9 | ±10.53 |
| N154S/R284G tazCTT HPRE SV40pA | | |
| 1.76 CMV huIL-15Rα-IL-15sc T2A huSTING | 324.5 | ±51.87 |
| N154S/R284G tazCTT WPRE SV40pA | | |
| 1.76 CMV huIL-15Rα-IL-15sc P2A huSTING | 397.7 | ±42.62 |
| N154S/R284G tazCTT WPRE SV40pA | | |
| 1.76 CMV huIL-15Rα-IL-15sc RAKR-T2A huSTING tazCTT | 1915 | ±16.64 |
| N154S/R284G HPRE bGHpA | | |
| 1.76 CMV huIL-15Rα-IL-15sc RRKR-T2A huSTING | 1093 | ±3.221 |
| N154S/R284G tazCTT HPRE bGHpA | | |
| 2.1 CMV VCIP huIL-15Rα-IL-15sc T2A huSTING | 2758 | ±114.5 |
| N154S/R284G tazCTT HPRE bGHpA | | |
| 2.1 CMV VCIP huIL-15Rα-IL-15sc P2A huSTING | 2457 | ±1.527 |
| N154S/R284G tazCTT HPRE bGHpA | | |
| 2.1 CMV VCIP huIL-15Rα-IL-15sc T2A huSTING | 3616 | ±202.8 |
| N154S/R284G tazCTT WPRE bGHpA | | |
| 2.1 CMV VCIP huIL-15Rα-IL-15sc P2A huSTING tazCTT | 2327 | ±199 |
| N154S/R284G WPRE bGHpA | | |
| 2.1 CMV VCIP huIL-15Rα-IL-15sc T2A huSTING tazCTT | 397.5 | ±148.8 |
| N154S/R284G HPRE SV40pA | | |
| 2.1 CMVVCIP huIL-15Rα-IL-15sc P2A huSTING | 184.3 | ±39.19 |
| N154S/R284G tazCTT HPRE SV40pA | | |
| 2.1 CMV VCIP huIL-15Rα-IL-15sc T2A huSTING | 551 | ±15.35 |
| N154S/R284G tazCTT WPRE SV40pA | | |
| 2.1 CMV VCIP huIL-15Rα-IL-15sc P2A huSTING | 662.9 | ±99.41 |
| N154S/R284G tazCTT WPRE SV40pA | | |
| 2.1 CMV VCIP huIL-15Rα-IL-15sc RAKR-T2A huSTING | 2553 | ±71.83 |
| N154S/R284G tazCTT HPRE bGHpA | | |
| 2.1 CMV VCIP huIL-15Rα-IL-15sc RRKR-T2A huSTING | 1919 | ±332.6 |
| N154S/R284G tazCTT HPRE bGHpA | | |
| 1.76 CMV huIL-15Rα-IL-15sc VCIP huSTING N154S/R284G | 1507 | ±97.77 |
| tazCTT HPRE bGHpA | | |
| 1.76 CMV huIL-15Rα-IL-15sc New spacer* VCIP huSTING | 1385 | ±28.04 |
| N154S/R284G tazCTT HPRE bGHpA | | |
| 1.76 CMV huIL-15Rα-IL-15sc Longer spacer** VCIP huSTING | 2648 | ±178.2 |
| N154S/R284G tazCTT HPRE bGHpA | | |

*New spacer = ACGTCTTCTCTTTTTAAAGGACCTCGTGAAATAAAAGTGC
** Longer spacer = TCCGAGCCAAGTAAGGAGGTCCCTCTCTCTCTCTCCCCCCACGTCTTCTCTTTTTAAAGGACCTCGTGAAATAAAAGTGC

[1565] The differences in the downstream IFN-β signaling, induced in human M2 macrophages by the different huIL-15Rα-IL-15sc and huSTING N154S/R284G tazCTT constructs, was determined. Nucleic acids encoding huIL-15Rα-IL-15sc and huSTING N154S/R284G tazCTT were cloned into vectors, with and without a VCIP IRES, placed before the start codon of either the huIL-15Rα-IL-15sc or huSTING N154S/R284G tazCTT coding sequences.

[1566] Frozen human monocytes, isolated from healthy human donors, were thawed in complete medium (RPMI-1640+10% FBS), and washed by centrifugation for 10 minutes at 600×g at room temperature. The monocytes were resuspended in ImmunoCult™-SF Macrophage Medium (StemCell Technologies), containing 100 ng/mL human M-CSF. The monocytes (5e5 cells per well) then were seeded in a 24-well plate with a final volume of 500 μL. Five days later, 250 μL of ImmunoCult™-SF Macrophage Medium (StemCell Technologies), containing 300 ng/mL human M-CSF+60 ng/mL human IL-4+60 ng/mL human IL-10, was added to each well, and the cells were incubated for 2 more days. On day 7, the cells were transfected using Viromer® RED mRNA and plasmid transfection reagent, according to the manufacturer's instructions. 750 ng of plasmid DNA, from a panel of different plasmid constructs, as well as a “no DNA” control (encoding secNanoLuc®), were diluted in the provided buffer, and mixed with Viromer® RED transfection reagent, and the mixture was incubated at room temperature for 15 minutes to allow the DNA/Viromer® RED complexes to form. The DNA/Viromer® RED complexes were then slowly added to each well of the 24-well plate (in triplicate), and the plate was incubated at 37° C. in a 5% CO₂ incubator. Cell culture supernatants were harvested at 48 hours, and were assayed for IFN-β using a human cytokine panel U-Plex® assay (Meso Scale Discovery), according to the manufacturer's protocol. The average of three measurements was calculated, and background signal from the no DNA control was subtracted, to calculate the net IFN-β expression levels.

[1567] The results, which are summarized in the table below, show that the construct encoding only huIL-15Rα-IL-15sc (and no STING), does not induce any IFN-β expression in transfected human M2 macrophages. The construct that results in the highest level of IFN-β expression in transfected human M2 macrophages is the construct designated pATI2.1 CMV VCIP huIL-15Rα-IL-15sc T2A huSTING N154S/R284G tazCTT HPRE bGHpA. This construct (designated pATI2.1 CMV VCIP huIL-15Rα-IL-15sc T2A huSTING N154S/R284G tazCTT HPRE bGHpA) results in a higher level of IFN-β expression than constructs with the pATI1.76 backbone, and with no VCIP IRES at all, or with a VCIP IRES between the ORFs of huIL-15Rα-IL-15sc and huSTING N154S/R284G tazCTT (i.e., where the VCIP IRES replaces a 2A sequence). The construct designated pATI2.1 CMV VCIP huIL-15Rα-IL-15sc T2A huSTING N154S/R284G tazCTT HPRE bGHpA results in a higher IFN-β signal, compared to the corresponding construct containing a P2A sequence instead of a T2A sequence. These results indicate that bicistronic constructs, containing a VCIP IRES upstream of the two ORFs, and a 2A sequence, particularly T2A, between the two ORFs, result in higher expression levels of the second encoded payload (in this case, a modified STING protein).

Net Signal of IFN-β Protein Expression Following Transfection of Human M2 Macrophages with Various Constructs

| | Net IFN-β | Standard |
|---|---|---|
| Construct | (pg/mL) | Deviation |
| pATI2.1 CMV VCIP secNanoLuc ® HPRE bGHpA | 0.00 | ±133.76 |
| pATI1.76 CMV huIL-15Rα-IL-15sc HPRE bGHpA | −411.92 | ±229.81 |
| pATI1.76 CMV huSTING N154S/R284G tazCTT HPRE bGHpA | 2710.37 | ±579.12 |
| pATI1.76 CMV huIL-15Rα-IL-15sc T2A huSTING N154S/R284G | −788.33 | ±139.87 |
| tazCTT HPRE bGHpA | | |
| pATI2.1 CMV VCIP huIL-15Rα-IL-15sc T2A huSTING | 5505.08 | ±397.48 |
| N154S/R284G tazCTT HPRE bGHpA | | |
| pATI2.1 CMV VCIP huIL-15Rα-IL-15sc P2A huSTING | 1425.51 | ±62.06 |
| N154S/R284G tazCTT HPRE bGHpA | | |
| pATI1.76 CMV huIL-15Rα-IL-15sc VCIP huSTING N154S/R284G | 1630.63 | ±709.30 |
| tazCTT HPRE bGHpA | | |
| pATI1.76 CMV huIL-15Rα-IL-15sc New spacer* VCIP huSTING | 2014.95 | ±97.68 |
| tazCTT N154S/R284G HPRE bGHpA | | |
| pATI1.76 CMV huIL-15Rα-IL-15sc Longer spacer** VCIP huSTING | 385.71 | ±158.29 |
| N154S/R284G tazCTT HPRE bGHpA | | |

*New spacer = ACGTCTTCTCTTTTTAAAGGACCTCGTGAAATAAAAGTGC
**Longer spacer = TCCGAGCCAAGTAAGGAGGTCCCTCTCTCTCTCTCCCCCCACGTCTTCTCTTTTTAAAGGACCTCGTGAAATAAAAGTGC

### Example 28

### Expression of Phospholipase D as a Method to Improve Plasmid Delivery

[1568] As part of its pathogenesis, Salmonella enterica serovar Typhimurium is phagocytized by myeloid cells, and activates a virulence program to alter phagosomes into Salmonella-containing vacuoles (SCVs). While ectopic expression of genes encoded on the plasmid requires plasmid translocation from the SCV to the nucleus, the mechanism of this translocation event is unknown. This example provides an engineering approach to improve plasmid transfer from the engineered immunostimulatory bacteria.

[1569] Rickettsia prowazekii is a Gram-negative intracellular pathogen that must escape the phagosomal compartment in order to access the host cytosol and replicate. Previous work has shown that the secreted R. prowazekii virulence factor, Phospholipase D (Pld), can be cloned into S. enterica to facilitate escape from the SCV (see, e.g., Whitworth et al. (2005) Infection and Immunity 73(10):6668-6673). The pld gene (SEQ ID NO:432), encoding Pld (SEQ ID NO:433), was placed under the control of the ssaG promoter, which is induced in the SCV (see, e.g., Walthers et al. (2007) Molecular Microbiology 65(2):477-493), to ensure high expression after the bacteria is delivered into phagocytic cells. This bacterial expression cassette was cloned into the backbone of two NanoLuciferase® reporter plasmids, designated CMV-NanoLuc® and EF1α-NanoLuc®, and plasmid delivery was assessed in human macrophages.

[1570] To measure plasmid delivery into infected cells, primary human monocytes were differentiated in ImmunoCult™-SF Macrophage Medium (StemCell Technologies), containing 100 ng/ml GM-CSF, for 5 days. On day 6, the cells were supplemented with additional media containing 150 ng/ml GM-CSF and 60 ng/ml huIL-4 for 48 hours. The cells were then bactofected with stationary phase strains of YS1646Δasd/ΔFLG/ΔpagP/ΔansB/ΔcsgD bacteria, comprising one of the CMV-NanoLuc®, CMV-NanoLuc®+pld, EF1α-NanoLuc®, or EF1α-NanoLuc®+pld plasmids. The bacterial strains were grown overnight at 37° C. in 4XYT medium, at an MOI (multiplicity of infection) of 100. Infected cells were centrifuged for 5 minutes at 500 rcf, and then incubated at 37° C. for 1 hour, after which the cells were washed thrice with DPBS, and incubated in fresh ImmunoCult™-SF Macrophage Medium, containing 100 μg/ml gentamicin to eliminate any extracellular bacteria. At 24 and 48 hours post-infection, the cell supernatants were harvested, and the NanoLuciferase® luciferase contents were measured using a luciferase assay (Promega). The cells also were lysed with 0.1% Triton X in PBS and plated, to enumerate the number of colony forming units (CFUs) that remained inside the cells.

[1571] The results, which are summarized in the table below, show that, when placed under the control of the CMV promoter, the levels of NanoLuciferase® expressed from the pld-encoding group (i.e., the CMV-NanoLuc® luciferase+pld plasmids) were greater than the levels of NanoLuciferase® expressed from the CMV-NanoLuc® luciferase plasmid alone, at 24 hours post-infection; this difference grew in magnitude at 48 hours post-infection.

[1572] Bactofection of cells with engineered immunostimulatory bacteria encoding pld also resulted in higher luminescence levels than corresponding infections without pld, when the NanoLuc® was placed under the control of the EF-1α promoter. This effect was lower than what was observed in the groups with the CMV promoter, indicating that some pld expression is enhanced by leakiness from the CMV promoter.

Comparison of Luciferase Expression Levels in Cell Supernatants of Human Macrophages Infected with Bacterial Strains Containing Plasmids Encoding Pld, vs. those not Encoding Pld

| Plasmid | Average | | Average | | Average | |
|---|---|---|---|---|---|---|
| Delivered | Luminescence | SD | Luminescence | SD | Luminesence | SD |
| by the | t = 0 | t = 0 | 24 hpi | 24 hpi | 48 hpi | 48 hpi |
| Bacteria | (RLUs) | (RLUs) | (RLUs) | (RLUs) | (RLUs) | (RLUs) |
| Uninfected | 122.9 | ±47.7 | 177.9 | ±25.8 | 157.6 | ±18.2 |
| CMV- | 2057.0 | ±517.2 | 2291.2 | ±233.9 | 3443.9 | ±124.4 |
| NanoLuc ® | | | | | | |
| CMV- | 1412.6 | ±73.6 | 8155.0 | ±2156.2 | 12054.8 | ±3112.9 |
| NanoLuc ® + | | | | | | |
| pld | | | | | | |
| EF1a- | 154.6 | ±20.8 | 148.6 | ±24.3 | 132.5 | ±5.2 |
| NanoLuc ® | | | | | | |
| EF1a- | 165.6 | ±7.5 | 223.4 | ±18.3 | 256.0 | +24.7 |
| NanoLuc ® + | | | | | | |
| pld | | | | | | |

hpi = hours post-infection; SD = standard deviation; RLUs = relative light units.

[1573] The results also showed that the number of CFUs of the CMV-NanoLuc®+pld-encoding strain, that remained inside the cells at 24 and 48 hours post-infection (hpi), decreased at a greater rate than the number of CFUs of bacteria harboring the CMV-NanoLuc® luciferase plasmid alone, indicating a different fate for each strain within the same cells.

### CFUs Remaining Inside the Cells at Different Time Points

| | CFUs, | CFUs, | CFUs, |
|---|---|---|---|
| | 0 Hours | 24 Hours | 48 Hours |
| | Post- | Post- | Post- |
| Strain | Infection | Infection | Infection |
| CMV-NanoLuc ® | 5.4 × 10⁷ | 1.5 × 10⁵ | 4.2 × 10³ |
| CMV-NanoLuc ® + pld | 8.0 × 10⁷ | 1.6 × 10⁴ | 6.4 × 10² |
| EF1α-NanoLuc ® | 7.8 × 10⁷ | 5.5 × 10⁴ | 2.5 × 10³ |
| EF1α-NanoLuc ® + pld | 6.8 × 10⁷ | 2.6 × 10⁵ | 2.3 × 10³ |

[1575] To determine if encoding Phospholipase D in the bacterial plasmid enhances the delivery of immunomodulatory payloads encoded on the same plasmid, RAW-Dual™ TLR4-KO cells (which express STING; InvivoGen) were infected with bacterial strains containing plasmids with and without nucleic acid encoding pd. RAW-Dual™ TLR4-KO cells encode a Lucia™ luciferase reporter under the control of an Interferon-Stimulated Response Element (ISRE). The cells were cultured in DMEM+10% FBS, seeded into wells, and allowed to adhere overnight. Bactofections were performed as described above, using strains of YS1646Δasd/ΔFLG/ΔpagP/ΔansB/ΔcsgD, containing plasmids encoding huIL-15Rα-IL-15sc and huSTING N154S/R284G tazCTT, with or without nucleic acid encoding pld under control of the ssaG promoter. Uninfected cells, and uninfected cells treated with 5 μg/ml of the STING agonist 3′5′ RpRp c-di-AMP, were used as negative and positive controls, respectively. At 48 hours post-infection, the cell supernatants were harvested, and the levels of expressed Lucia™ luciferase were measured using a luciferase assay (Promega).

[1576] The results, which are shown in the table below, show that, when pld was expressed during infection, from a plasmid also encoding human IL-15Rα-IL-15sc and the STING mutant polypeptide, the ISRE activity (as measured by Lucia™ luciferase expression) was higher than in the absence of pld expression. The ISRE activity is a measure of the STING-induced type I IFN activity, and thus, is indicative of the delivery of the plasmids encoding the STING variant, and of expression of the STING variant in the cells. Expression of phospholipase D (pld), thus, enhances the delivery of plasmids that also encode immunomodulatory payloads.

### Effects of pld Expression on the Delivery of Plasmids Encoding Immunomodulatory Payload Combinations by Immunostimulatory Bacteria

| | Average | |
|---|---|---|
| | Luminescence | |
| Plasmid Construct | (RLUs) | STDEV |
| Uninfected cells | 63.6 | ±12.1 |
| Uninfected cells + 5 μg/ml 3′5′ RpRp c-di-AMP | 1052.6 | ±32.3 |
| VCIP huIL-15Rα-IL-15sc T2A huSTING | 80.5 | ±20.9 |
| N154S/R284G tazCTT | | |
| VCIP huIL-15Rα-IL-15sc T2A huSTING | 108.3 | ±4.5 |
| N154S/R284G tazCTT (P-ssaG-pld) | | |

STDEV = standard deviation

### Example 29

### The Combination of Murine IL-15Rα-IL-15sc and huSTING N154S/R284G tazCTT, and the Combination thereof with Murine Anti-CTLA-4 scFv-Fc, Induces the Secretion of CXCL10 from Myeloid Cells and Induces the Activation of T-Cells

[1578] The impact of the expression of the immunomodulatory payloads, and their combinations, on the activation and function of T-cells and myeloid cells, was evaluated. This example describes and demonstrates the impact of the delivery of various immunomodulatory payload combinations, by the immunostimulatory bacteria provided herein, on the activation of antigen-specific T-cells (in terms of CD25 expression and IFN-γ secretion), and on the secretion of CXCL10, a key chemokine involved in the recruitment of anti-tumor T-cells, by myeloid cells. The levels of secreted cytokines, such as IFN-γ, IFN-β, and CXCL10 (IP-10), were measured as correlates of protective anti-tumor immunity, and CD25 cell surface expression was monitored as a marker of T-cell activation. This was assessed by transfecting mouse bone-marrow derived dendritic cells (BMDCs) with plasmids encoding various combinations of payloads, co-culturing the transfected dendritic cells with autologous mouse T-cells, and then identifying the resulting cytokines.

[1579] The plasmids encoding the immunomodulatory payloads/proteins included those encoding single payloads, as well as those encoding combinations of payloads. For example, as shown in the table below, encoded payloads included murine (mu) IL-15Rα-IL-15sc (also referred to as IL-15/IL-15Rα complex, as IL-15/IL-15Rα chain complex, IL-15/IL-15R alpha chain complex, IL-15 complex, and IL-15cplex); a murine anti-CTLA-4 scFv-Fc (clone 9D9); and huSTING N154S/R284G tazCTT (a chimeric protein containing human STING with the GOF mutations N154S and R284G, and a replacement of the C-terminal tail (CTT) of human STING with the CTT of Tasmanian devil STING); and combinations thereof.

[1580] Combinations of payloads included two or three payloads, expressed on a single plasmid using T2A and/or P2A peptides, such that the proteins are encoded under the control of the same promoter. The combinations of payloads included: 1) murine IL-15Rα-IL-15sc and human STING N154S/R284G tazCTT; and 2) murine anti-CTLA-4 scFv-Fc, murine IL-15Rα-IL-15sc, and human STING N154S/R284G tazCTT.

[1581] Bone marrow-derived dendritic cells (BMDCs) were differentiated from Goldenticket mice, which are STING deficient, and the cells were transfected with plasmids encoding various combinations of the investigated payloads. Twenty-four hours post-transfection, cell supernatants were harvested, and the levels of secreted CXCL10 were measured in BMDC culture supernatants, using a U-Plex® assay platform from Meso Scale Discovery, according to the manufacturer's protocol.

[1582] To measure CD8⁺ T-cell activation, transfected BMDCs were pulsed with chicken ovalbumin (OVA) SIINFEKL (OVA₂₅₇₋₂₆₄) peptide, a major histocompatibility complex (MHC) class I (H-2Kb)-restricted peptide epitope recognized by CD8+ T-cells. Splenic T-cells, isolated from Rag1^{-/-} OT-I mice, which express T-cell receptors (TCRs) that are specific for SIINFEKL presented by the MHC class I molecule H-2Kb, were added to the BMDCs for co-culture. After 24 hours of BMDC/T-cell co-culture, supernatants were harvested, and the levels of secreted IFN-γ were measured using a U-Plex® assay platform from Meso Scale Discovery, according to the manufacturer's protocol.

[1583] The co-cultured cells also were harvested, and CD8⁺ T-cells were stained with a phycoerythrin (PE)-conjugated murine anti-CD25 antibody (clone PC61, BioLegend), to determine the expression levels of the CD25 T-cell activation marker.

[1584] The results are summarized in the table below, which shows the levels of CXCL10 secreted by BMDCs in response to transfection with plasmids encoding various single and combination payloads, as well as the levels of IFN-γ secreted by CD8⁺ T-cells, and the levels of T-cell activation (in terms of CD25 expression), following co-culture with the transfected BMDCs.

[1585] The results show that huSTING N154S/R284G tazCTT alone induces very high levels of CXCL10 secretion by BMDCs. Combinations of murine IL-15Rα-IL-15sc with huSTING N154S/R284G tazCTT, or of murine anti-CTLA-4 scFv-Fc+murine IL-15Rα-IL-15sc+huSTING N154S/R284G tazCTT, also induce high levels of CXCL10 secretion by BMDCs.

[1586] The results also show exemplary combinations of encoded payloads that induce high levels of secretion of IFN-γ by human T-cells, and induce the activation (CD25 expression) of T-cells. An increased effect was observed with the combination of muIL-15Rα-IL-15sc and huSTING N154S/R284G tazCTT. The combination of muIL-15Rα-IL-15sc and huSTING N154S/R284G tazCTT also results in increased activation of CD8⁺ T-cell responses, and the expression of CD25. These results indicate that the delivery of the combination of IL-15Rα-IL-15sc and the modified STING chimera with a gain-of-function mutation or mutations and with a CTT replacement to reduce NF-κB signaling, to the tumor microenvironment, increases advantageous anti-tumor immune responses, and reduces undesirable inflammatory responses.

| | CXCL10 | | IFN-γ | | | |
|---|---|---|---|---|---|---|
| | Secreted by | | Secreted by | | % CD25 | |
| | BMDCs | | CD8⁺ T-Cells | | Expression on | |
| BMDC Treatments | (pg/ml) | | (pg/ml) | | CD8⁺ T-Cells | |
| (Transfections) | Mean | SEM | Mean | SEM | Mean | SEM |
| Untransfected control | 11 | 0 | 1102 | 70 | 17 | 3 |
| Beta-actin (plasmid control) | 159 | 18 | 1391 | 27 | 26 | 1 |
| muIL-15Rα-IL-15sc | 286 | 43 | 1705 | 139 | 43 | 1 |
| muAnti-CTLA-4 scFv-Fc | 627 | 9 | 2182 | 87 | 41 | 7 |
| huSTING N154S/R284G tazCTT | 3612 | 62 | 2731 | 121 | 54 | 1 |
| muIL-15Rα-IL-15sc + | 2340 | 190 | 2973 | 246 | 70 | 21 |
| huSTING N154S/R284G tazCTT | | | | | | |
| muAnti-CTLA-4 scFv-Fc + | 1860 | 96 | 3098 | 165 | 51 | 2 |
| muIL-15Rα-IL-15sc + | | | | | | |
| huSTING N154S/R284G tazCTT | | | | | | |

SEM = Standard Error of the Mean

[1587] Delivery of this combination of encoded payloads, by the immunostimulatory bacteria provided herein, or by other delivery vehicles, such as oncolytic viruses or vectors, for expression of the payloads in tumor-resident myeloid cells and/or in the tumor microenvironment, provides for increased anti-tumor responses in the treated subject. As also shown in Examples below, the combination of a cytokine and a modified STING protein with a gain-of-function mutation, including the chimeras, results in additional advantageous anti-tumor responses in a treated subject.

### Example 30

### Human Recombinant IL-15, in Combination with a Small Molecule STING Agonist, Induces the Secretion of CXCL10 from Myeloid Cells, and Induces the Activation of T-Cells

[1588] This Example shows the impact of the expression of human immunomodulatory payloads, and their combinations, on the activation and function of T-cells and myeloid cells. The levels of secreted cytokines, such as IFN-γ and CXCL10 (IP-10), were measured as indicators of protective anti-tumor immunity. This Example describes and demonstrates the impact of the recombinant monomeric human IL-15 cytokine and 2′3′-c-di-AM(PS)2 (Rp, Rp), a small molecule STING (smSTING) agonist, on the secretion of CXCL10 by myeloid cells, a chemokine that is involved in the recruitment of anti-tumor T-cells, and on the secretion of IFN-γ by antigen-specific T-cells. The smSTING agonist is a cyclic dinucleotide (CDN) known to induce the production of type I interferons (IFNs) following its recognition by endoplasmic reticulum-resident STING. 2′3′-c-di-AM(PS)2 (Rp, Rp) is the Rp, Rp-isomer of the 2′3′-bisphosphorothioate analog of 3′3′-cyclic adenosine monophosphate (c-di-AMP). It has a higher affinity for STING than c-di-AMP, due to the presence of a 2′-5′, 3′-5′ mixed linkage. This analog contains two phosphorothioate diester linkages to protect it against degradation by phosphodiesterases that are present in host cells or in the systemic circulation. 2′3′-c-di-AM(PS)2 (Rp, Rp) strongly induces type I IFN and CXCL10 production in relevant cells.

[1589] Human monocyte-derived dendritic cells (ModDCs) and autologous human T-cells were co-cultured with the small molecule (smSTING) agonist and the recombinant IL-15, and the resulting secreted cytokines were identified. The human monocyte-derived dendritic cells (ModDCs) were differentiated from negatively isolated monocytes, using the ImmunoCult™ Dendritic Cell Culture Kit (STEMCELL Technologies), for 6 days, following the manufacturer's instructions. After 6 days of differentiation, ModDCs were pulsed with a pool of 32 MHC class I-restricted viral peptides from human cytomegalovirus (CMV), Epstein-Barr virus (EBV), and influenza virus (Flu) (extended CEF peptide pool for human CD8 T cells, MABTECH), before the addition of autologous CD8⁺ T-cells, and treatment with 2.5 nM of recombinant human IL-15 and/or 5 μg/ml of smSTING. Pulsing the dendritic cells with the viral peptides causes the dendritic cells to present the viral antigens on their cell surfaces, and stimulates antigen-specific T-cells to produce IFN-gamma. After 48 hours of ModDC/T-cell co-culture, the levels of secreted IFN-γ and CXCL10 were measured in the cell culture supernatants, using a U-Plex® assay platform from Meso Scale Discovery, according to the manufacturer's protocol.

[1590] The results, which are summarized in the table below, show the additive effect of STING activation and human IL-15 activity on the secretion of CXCL10 by human dendritic cells upon antigen-specific stimulation. The results also show that the combination of STING activation and a cytokine, such as human IL-15, synergistically activates antigen-specific CD8⁺ T-cells, and induces high levels of IFN-γ secretion by the activated CD8⁺ T-cells.

| | CXCL10 | | IFN-γ | |
|---|---|---|---|---|
| | Secreted by | | Secreted by CD8⁺ | |
| | ModDCs (pg/ml) | | T-Cells (pg/ml) | |
| Treatments | Mean | SEM | Mean | SEM |
| Media (control) | 21337 | 1015 | 685 | 40 |
| smSTING (CDN) | 78407 | 3869 | 5185 | 654 |
| Recombinant human IL-15 | 38671 | 1052 | 35311 | 29713 |
| Recombinant human IL-15 + | 100673 | 3229 | 268328 | 17505 |
| smSTING (CDN) | | | | |

SEM = Standard Error of the Mean

### Example 31

### Combinations of Gain-of-Function STING Variants and Cytokines Enhance the Anti-Tumor Immune Response

The Combination of Human IL-15Rα-IL-15sc and huSTING N154S/R284G tazCTT Induces the Secretion of IFN-β from Myeloid Cells, and Induces the Activation of T-Cells

[1591] This Example demonstrates the impact of the encoded human immunomodulatory payloads, and their combinations, that are delivered for expression in the TME and/or in tumor-resident myeloid cells, on the activation and function of human T-cells and dendritic cells. The levels of cytokines secreted by the dendritic cells and the T-cells, such as IFN-γ and IFN-β, respectively, were measured as correlates of protective anti-tumor immunity. This example describes and demonstrates the impact of the delivery of various immunomodulatory payload combinations to the tumor microenvironment, such as by the immunostimulatory bacteria exemplified herein, and/or by other delivery vehicles described herein, on the activation of antigen-specific T-cells (as demonstrated by IFN-γ secretion), and on the secretion of IFN-β, a key factor involved in the anti-tumor immune response. This was achieved by transfecting human monocyte-derived dendritic cells (ModDCs) with plasmids encoding various combinations of payloads, co-culturing the transfected dendritic cells with autologous human T-cells, and identifying the cytokines secreted as a result. The plasmids encoding the immunomodulatory payloads/proteins included those encoding single payloads, and those encoding combinations of payloads. For example, as shown in the table below, the encoded payloads included huIL-15Rα-IL-15sc alone, huSTING N154S/R284G tazCTT alone, and the combination of huIL-15Rα-IL-15sc and huSTING N154S/R284G tazCTT.

[1592] Human monocyte-derived dendritic cells (ModDCs) were differentiated from negatively isolated monocytes using the ImmunoCult™ Dendritic Cell Culture Kit (STEMCELL Technologies) for 6 days, following the manufacturer's instructions. After 6 days of differentiation, ModDCs were transfected with plasmids encoding the various investigated payloads and combinations thereof, using the Viromer® RED mRNA and plasmid DNA transfection reagent (Origene). Four hours post-transfection, the ModDCs were pulsed with a pool of 32 MHC class I-restricted viral peptides from human cytomegalovirus (CMV), Epstein-Barr virus (EBV), and influenza virus (Flu) (extended CEF peptide pool for human CD8 T cells, MABTECH), before the addition of autologous CD8⁺ T-cells to the cell culture. The transfected dendritic cells also were pulsed with an irrelevant peptide from the Human Immunodeficiency virus 1 (HIV-1) reverse transcriptase, and used as a negative control for the peptide stimulation of T-cells. CD8⁺ T-cells from HIV-1 negative donors were used. After 48 hours of ModDC/T-cell co-culture, the levels of IFN-γ secreted by the T-cells were measured in the cell culture supernatants, using a U-Plex® assay platform from Meso Scale Discovery, according to the manufacturer's protocol.

[1593] In a separate experiment, ModDCs were transfected with plasmids encoding the various investigated payloads and combinations thereof, using the Viromer® RED mRNA and plasmid DNA transfection reagent (Origene), and cultured for forty-eight hours. Cell culture supernatants from the transfected ModDCs were harvested forty-eight hours post-transfection, and the levels of secreted IFN-β were measured using a U-Plex® assay platform from Meso Scale Discovery, according to the manufacturer's protocol. In order to analyze the impact of the encoded payloads on the secretion of IFN-β by the human dendritic cells, the concentration of IFN-β measured for the plasmid control group (Beta-actin) was subtracted from all the other groups in the study, providing the net IFN-β concentrations resulting only from the activities of the encoded payloads.

[1594] The results, which are summarized in the table below, show the synergistic effect of the combination of huIL-15Rα-IL-15sc and huSTING N154S/R284G tazCTT activities on the secretion of IFN-β by human dendritic cells. The results also show the combined effects of huIL-15Rα-IL-15sc and huSTING N154S/R284G tazCTT, which are at least additive, on the activation of antigen-specific CD8⁺ T-cells, and the induction of high levels of secreted IFN-γ from the activated T-cells.

| | Net IFN-β | | | | |
|---|---|---|---|---|---|
| | Secreted by | IFN-γ Secreted by CD8⁺ | | | |
| | ModDCs | T-Cells (pg/ml) | | | |
| ModDC Treatments | (pg/ml) | HIV Peptides | | CEF Peptides | |
| (Transfections) | Mean | Mean | SEM | Mean | SEM |
| Untransfected control | 0 | 205 | 62 | 1661 | 169 |
| Beta-actin (plasmid control) | 0 | 7639 | 2422 | 18252 | 619 |
| huSTING N154S/R284G | 647 | 11746 | 825 | 31452 | 3280 |
| tazCTT | | | | | |
| huIL-15Rα-IL-15sc | 226 | 10670 | 2397 | 39245 | 6439 |
| huIL-15Rα-IL-15sc + | 1281 | 16953 | 3595 | 42942 | 8083 |
| huSTING N154S/R284G | | | | | |
| tazCTT | | | | | |

SEM = Standard Error of the Mean

[1595] It is shown in the next Example, that the combined effects of the encoded payloads lead to synergistic results, as evidenced by the cures observed in mouse models of cancer.

### Example 32

### Combinations of muIL-15Rα-IL15sc, huSTING N154S/R284G tazCTT, and Murine Anti-CTLA-4 scFv-Fc, Demonstrate Superior Anti-Tumor Efficacy in a Highly Refractory Mouse Model of Triple Negative Breast Cancer

[1596] The synergistic effects observed in the previous Example (Example 31), are further shown in this Example, which shows that the combinations of payloads act synergistically in effecting cures. Various payload combinations were evaluated for in vivo efficacy in an orthotopic, T-cell excluded, and metastatic model of CPI (immune checkpoint inhibitor) refractory triple-negative breast cancer. For this experiment, 6-8 week-old female BALB/c mice (8 mice per group) were inoculated in the left mammary fat pad with EMT6 tumor cells (ATCC® CRL-2755™) (1×10⁶ cells in 100 μL PBS). Mice bearing 7 day-old established mammary tumors (˜65 mm³ in volume) were intravenously (IV) injected with a single dose of 1×10⁷ CFUs of strains of YS1646Δasd/ΔFLG/ΔpagP/ΔansB/ΔcsgD containing plasmids encoding the various payloads, alone, or in combination with weekly intraperitoneal (IP) injections of 100 pg of the anti-PD-L1 antibody atezolizumab. The YS1646Δasd/ΔFLG/ΔpagP/ΔansB/ΔcsgD strains contained plasmids encoding muIL-15Rα-IL15sc+huSTING N154S/R284G tazCTT, or muIL-15Rα-IL15sc+huSTING N154S/R284G tazCTT+muAnti-CTLA-4 scFv-Fc, or the control plasmid encoding β-actin, and were compared to treatment with PBS control.

[1597] The results are summarized in the table below. The tumors in the PBS-treated mice grew evenly, reaching a max tumor volume at day 31. Treatment of mice with the control β-actin plasmid did not demonstrate much evidence of anti-tumor efficacy (5% tumor growth inhibition (TGI), 2/8 cures), nor did treatment with IP anti-PD-L1 alone (17.9% TGI, 1/8 cures). Mice that were IV treated with the bacterial strain containing a plasmid encoding muIL-15Rα-IL15sc+huSTING N154S/R284G tazCTT demonstrated monotherapy efficacy (59.8% TGI, 3/8 cures), which improved with the combination of IP anti-PD-L1 (77.3% TGI, 5/8 cures). The combination of muIL-15Rα-IL15sc+huSTING N154S/R284G tazCTT+muAnti-CTLA-4 scFv-Fc also demonstrated significant monotherapy efficacy (62.4% TGI, 4/8 cures).

[1598] The therapeutic payload combinations were very well tolerated, and mice did not lose weight during the study. These data demonstrate the in vivo potency of IV administered immunostimulatory bacteria encoding the combinations of muIL-15Rα-IL15sc+huSTING N154S/R284G tazCTT, alone, or enhanced with IP administered anti-PD-L1, and muIL-15Rα-IL15sc+huSTING N154S/R284G tazCTT+muAnti-CTLA-4 scFv-Fc, in an orthotopic, T-cell excluded, and metastatic model of checkpoint inhibitor refractory triple-negative breast cancer (TNBC).

Effects of Combinations of Encoded Payloads, Delivered by Immunostimulatory Bacteria, with and without addition of IP Anti-PD-L1, on the Inhibition of Tumor Growth and on the Cure of Mice with Checkpoint Inhibitor Triple-Negative Breast Cancer

| Encoded Payload(s) and Anti-PD-L1 | Tumor Growth | |
|---|---|---|
| Treatments | Inhibition (TGI) | Cures |
| Beta-actin (plasmid control) | 5% | 2/8 |
| Intraperitoneal (IP) Anti-PD-L1 alone | 17.9% | 1/8 |
| muIL-15Rα-IL15sc + | 59.8% | 3/8 |
| huSTING N154S/R284G tazCTT | | |
| muIL-15Rα-IL15sc + | 77.3% | 5/8 |
| huSTING N154S/R284G tazCTT + | | |
| IP Anti-PD-L1 | | |
| muIL-15Rα-IL15sc + | 62.4% | 4/8 |
| huSTING N154S/R284G tazCTT + | | |
| muAnti-CTLA-4 scFv-Fc | | |

[1599] A follow-up study was performed to evaluate the efficacy of higher doses of the muIL-15Rα-IL15sc+huSTING N154S/R284G tazCTT combination therapy, and for comparison with the efficacies of individually administered muIL-15Rα-IL15sc and huSTING N154S/R284G tazCTT. Strains of YS1646Δasd/ΔFLG/ΔpagP/ΔansB/ΔcsgD, containing plasmids encoding muIL-15Rα-IL15sc, huSTING N154S/R284G tazCTT, or the combination thereof, were administered intravenously (IV), at a dose of 3e7 CFUs, to mice bearing 7 day-old established mammary tumors, and were compared to PBS control. The tumors in the PBS-treated mice grew evenly, reaching a maximum tumor volume at day 31. As shown in the table below, mice treated with the bacterial strain containing a plasmid encoding muIL-15Rα-IL15sc or huSTING N154S/R284G tazCTT alone demonstrated 2/10 cures each, whereas the combination of muIL-15Rα-IL15sc+huSTING N154S/R284G tazCTT resulted in 7/10 cures.

| Encoded Payload(s) | Cures |
|---|---|
| PBS Control | 0/10 cures |
| muIL-15Rα-IL15sc | 2/10 cures |
| huSTING N154S/R284G tazCTT | 2/10 cures |
| muIL-15Rα-IL15sc + huSTING | 7/10 cures |
| N154S/R284G tazCTT | |

[1600] These data show the synergistic potency of combinations of a cytokine and a modified STING protein, such as the combination of muIL-15Rα-IL15sc+huSTING N154S/R284G tazCTT, for promoting complete responses. It is particularly significant, since these results were achieved in a highly refractory model of breast cancer, which highlights the general anti-tumor therapeutic potency of the combination. These results indicate the synergistic anti-tumor potency of the combination of a cytokine, such as the IL-15Rα-IL15sc fusion protein, and a STING protein, particularly a highly active STING protein, such as a gain-of-function constitutively active STING variant, or a gain-of-function constitutively active STING variant that is further modified to have reduced NF-κB signaling.

[1601] Cured mice from the muIL-15Rα-IL15sc+huSTING N154S/R284G tazCTT combination treatment groups (described above) then were evaluated for the ability to promote durable anti-tumor immunity in an orthotopic EMT6 tumor re-challenge study, and in a CD8⁺ T-cell dependent manner. For this study, 20 cured mice were divided into two groups of 10 mice each, and each mouse received IP injections of either 100 μg of an anti-CD8β antibody (which does not deplete CD8α⁺ dendritic cells), or 100 μg of an IgG isotype control, on days 3 and 1 prior to tumor re-challenge (day 56 and day 58 post-initial tumor implantation, respectively). The mice were bled prior to tumor re-challenge to confirm CD8⁺ T-cell depletion, and average circulating CD8⁺ T-cells were determined to be 5.72% for the isotype control, and 0.48% for the anti-CD8β antibody. The mice were then re-challenged with 1e6 EMT6 tumor cells, orthotopically on the opposite mammary fat pad, and compared to naïve, age-matched control mice (N=10). Mice from the naïve group all grew tumors to maximum tumor volume by day 30. Re-challenged mice from the anti-CD8β antibody-depleted group grew tumors even more aggressively than the naïve mice, whereas all 10 re-challenged mice from the IgG isotype antibody control group (i.e., mice without CD8⁺ T-cell depletion) were protected from tumor re-challenge. These data demonstrate the significant and durable anti-tumor efficacy of the combination of a cytokine and a modified gain-of-function constitutively active STING protein variant, such as when delivered in an immunostimulatory bacterium, such as a strain of YS1646Δasd/ΔFLG/ΔpagP/ΔansB/ΔcsgD bacteria, comprising plasmids encoding a combination of muIL-15Rα-IL15sc+huSTING N154S/R284G tazCTT. The combination of therapeutic payloads/proteins induces a high cure rate after IV administration of the bacteria, and mice are protected from tumor re-challenge in a CD8⁺ T-cell dependent manner.

### Example 33

### DLL3×CD3 T-Cell Redirection Antibody (TCRA) Design

[1602] T-cell redirection antibodies (TCRAs), or T-cell redirecting bispecific antibodies (TRBAs), are T-cell receptor (TCR) function-independent T-cell based immunotherapies, where the epsilon (e) domain of cluster of differentiation 3 (CD3), a component of the TCR complex, is targeted by one binding domain, while a second binding domain targets a tumor cell surface antigen. TCRAs include, for example, bispecific T-cell engagers (sold under the trademark BiTEs®), which are engineered antibody-based immunotherapies, that are fusion proteins of two single-chain variable fragments (scFvs), linked together by a peptide linker.

[1603] TCRAs induce the formation of a cytolytic synapse between the T-cell and the tumor cell, in an MHC-independent and TCR function-independent manner, by simultaneously binding to a tumor cell surface antigen, and to CD3 on T-cells, directing the cytolytic activity of T-cells selectively to the targeted tumor cells. Following the formation of the cytolytic synapse, the T-cells release cytotoxic proteins, such as perforin and granzymes (e.g., granzyme B), resulting in the apoptosis of the tumor cells. The activation of the T-cells results in the release of cytokines, engaging other immune cells and inducing a broader anti-tumor immune response. This results in the conversion of a non-inflamed (or cold) tumor environment to an inflamed (or hot) one, and results in the infiltration and proliferation of T-cells, and the killing of tumor cells. The original BiTE® antibodies have a short half-life; later generation BiTE® antibodies have an extended half-life by virtue of fusion to an Fc (see, e.g., Hipp et al. (2020) Clin. Cancer Res. 26:5258-5268; and Strohl, W. R. and Naso, M. (2019) Antibodies 8:41).

[1604] Delta-like ligand 3 (DLL3) is an inhibitory Notch pathway ligand that plays a role in Notch signaling during embryonal development. DLL3 is expressed intracellularly during embryonal development in normal tissues, with the highest expression in the fetal brain, but is absent in adult normal tissues. DLL3 is overexpressed in certain tumors, such as small cell lung cancers (SCLCs) and other high-grade neuroendocrine tumors, where, instead of being expressed intracellularly, it escapes to the cell surface, making it amenable to targeting with antibody-based therapeutics (see, e.g., Hipp et al. (2020) Clin. Cancer Res. 26:5258-5268). DLL3 also is expressed in other tumor types of neuroendocrine origin, including melanoma, glioblastoma multiforme, small cell bladder cancer, metastatic castration-resistant prostate cancer, and neuroendocrine lung tumors (see, e.g., Owen et al. (2019) Journal of Hematology & Oncology 12:61); hence, it is a useful target for TCRA-based therapies.

[1605] A DLL3×CD3 TCRA (see, SEQ ID NOs: 410 and 411 for the nucleotide and amino acid sequences, respectively; see, also, Hipp et al. (2020) Clin. Cancer Res.

26:5258-5268) was prepared from the light chain and heavy chain variable regions (V_{L} and V_{H}, respectively) of the anti-DLL3 clone hSC16.56 antibody (see, e.g., International Application Publication No. WO 2013/126746), and the light chain and heavy chain variable regions of the anti-CD3ε clone 145-2C11 antibody (available from BioLegend).

[1606] The construct included the mouse IgGκ leader/signal sequence from the pSecTag2 vector (corresponding to residues 1-21 of SEQ ID NO:411; see, e.g., addgene.org) for secretion of the TCRA. The anti-DLL3 V_{H} domain (corresponding to residues 22-139 of SEQ ID NO:411) was linked to the anti-DLL3 V_{L} domain (corresponding to residues 155-261 of SEQ ID NO:411) via a 15 amino acid long (Gly₄Ser)₃ linker (corresponding to residues 140-154 of SEQ ID NO:411), forming an anti-DLL3 scFv. A 5 amino acid long Gly₄Ser linker (corresponding to residues 262-266 of SEQ ID NO:411) was inserted between the anti-DLL3 scFv and the anti-CD3 scFv. The anti-CD3 scFv contains the anti-CD3 V_{H} domain (corresponding to residues 267-382 of SEQ ID NO:411), linked, via a second (Gly₄Ser)₃ linker (corresponding to residues 383-397 of SEQ ID NO:411), to the anti-CD3 V_{L} domain (corresponding to residues 398-504 of SEQ ID NO:411). This construct was designated DLL3HL×CD3HL, to indicate the order in which the heavy (H) and light (L) chain variable domains of the anti-DLL3 and anti-CD3 antibodies appear in the molecule. A FLAG tag (DYKDDDDK; SEQ ID NO:412) can be added to the C-terminal end of this construct for detection (for the FLAG tag-labeled DLL3×CD3 TCRA, designated DLL3HL×CD3HL-FLAG TCRA, see SEQ ID NO:413).

[1607] Another DLL3×CD3 TCRA construct, designated DLL3LH×CD3HL TCRA (see, SEQ ID NOs: 414 and 415 for the nucleotide and amino acid sequences, respectively), was constructed similarly to the DLL3HL×CD3HL construct, but, as the designation implies, the anti-DLL3 scFv contains the anti-DLL3 V_{L} domain placed N-terminally to the anti-DLL3 V_{H} domain. The anti-CD3 scFv portion of the TCRA, the GS linkers, and the leader sequence for secretion, all are as described above for the DLL3HL×CD3HL construct. A FLAG tag-labeled version of the DLL3LH×CD3HL TCRA construct, designated DLL3LH×CD3HL-FLAG TCRA (see, SEQ ID NOS: 416 and 417 for the nucleotide and amino acid sequences, respectively), also was constructed.

### Example 34

### Evaluation of T-Cell Redirection Antibodies (TCRAs) For Target Binding, Conjugation, And Cytotoxicity

[1608] Antibodies directed against CD (cluster of differentiation) antigens, such as CD19 and CD3, are anti-cancer targets. Expression of certain CD antigens is restricted to specific lineage lymphohematopoietic cells. Antibodies directed against lymphoid-specific antigens have been developed as therapeutics. CD19 is a useful target because it is expressed on B cells, it is not shed, it is uniformly expressed on all lymphoma cells, and it is absent from stem cells. CD3 is expressed on T-cells as part of the T-cell receptor (TCR) complex, which contains three chains: CD3ε, CD3δ, and CD37. The clustering of CD3 on T-cells, such as by immobilized anti-CD3 antibodies, results in T-cell activation that is similar to engagement of the T-cell receptor (TCR), but is independent of its clone typical specificity. A bispecific antibody, directed against each of the CD19 and the CD3 antigens, retargets T-cell cytotoxicity towards CD-19 positive cells (e.g., lymphoma cells), in an MHC-independent manner, and without the need for T-cell pre-stimulation or co-stimulation. Thus, such a molecule is particularly useful in inducing durable T-cell mediated anti-tumor immunity, and as an anti-cancer therapeutic.

[1609] The FLAG-tag variant sequence of the anti-CD19 and anti-CD3 TCRA, designated MT103 (SEQ ID NO:418; see, also, expired U.S. Pat. No. 7,112,324), was cloned into a vector designated pATI1.75 (described above). The MT103 TCRA construct contains a leader sequence (corresponding to residues 1-19 of SEQ ID NO:418), followed by a FLAG tag (DYKDDDDK; corresponding to residues 20-27 of SEQ ID NO:418), and an anti-CD19 scFv linked to an anti-CD3 scFv. The anti-CD19 scFv contains an anti-CD19 V_{L} domain (corresponding to residues 28-138 of SEQ ID NO:418), linked to an anti-CD19 V_{H} domain (corresponding to residues 154-277 of SEQ ID NO:418), via a (GGGGS)₃ linker (corresponding to residues 139-153 of SEQ ID NO:418). The anti-CD19 scFv is linked to the anti-CD3 scFv via a GGGGS linker (corresponding to residues 278-282 of SEQ ID NO:418). The anti-CD3 scFV contains an anti-CD3 V_{H} domain (corresponding to residues 283-401 of SEQ ID NO:418), linked via a peptide linker (VEGGSGGSGGSGGSGGVD; corresponding to residues 402-419 of SEQ ID NO:418), to an anti-CD3 V_{L} domain (corresponding to residues 420-525 of SEQ ID NO:418). The construct also includes a His tag (His₆; corresponding to residues 526-531 of SEQ ID NO:418).

[1610] HEK293T STING Null Cells (293-Dual™ Null Cells; InvivoGen) were seeded in 6-well plates coated with poly-L-lysine at 1.5e6 cells per well, and incubated overnight at 37° C. in a 5% CO₂ incubator, to achieve 80% confluency. The following day, 3000 ng of the MT103 plasmid DNA was diluted in serum-free media, and added to FuGENE® transfection reagent (Promega), at the proper reagent:DNA ratios, and the cells were transfected, with untransfected wells serving as negative controls (in duplicates). Cell culture supernatants from each sample were collected 48 hours post-transfection. The supernatant was either kept neat, or was concentrated using an Amicon® Ultra 4 mL centrifugal filter (Millipore Sigma).

[1611] To confirm the functionality of the expressed MT103 (CD19×CD3) TCRA, a flow cytometry experiment using Raji cells (purchased from ATCC) and Jurkat-Lucia™ NFAT cells (InvivoGen) was performed. The Raji cells are human lymphoblast cells that highly express CD19, and Jurkat cells are human T-lymphocytes that express CD3. 200,000 Raji cells, and 200,000 Jurkat cells, each were washed in PBS+2% FBS by centrifugation at 1300 RPM for 3 minutes. Then, 50 μL of either neat or concentrated cell culture supernatant, containing the expressed TCRA, was added to the cells, and incubated for 30 minutes at 37° C. in a 5% CO₂ incubator. The cells then were resuspended in PBS+2% FBS, and stained with an APC-labeled anti-FLAG tag antibody (BioLegend). The APC-labeled anti-FLAG tag antibody is added to label any MT103 TCRA (which contains a FLAG tag) that binds to CD19 on the Raji cells, and/or CD3 on the Jurkat cells. After a 30 minute incubation, the cells were washed twice with PBS+2% FBS by centrifugation at 1300 RPM for 3 minutes, and then were resuspended in PBS+2% FBS with DAPI (dead/live stain). Flow cytometry was performed, to detect any binding of the CD19×CD3 MT103 TCRA to CD19 on the Raji cells, and/or binding of the TCRA to CD3 on the Jurkat cells. 50,000 events were acquired for each sample. Flow cytometry data were acquired using the ACEA NovoCyte® flow cytometer (ACEA Biosciences, Inc.) and analyzed using the FlowJo™ software (Tree Star, Inc.).

[1612] As shown in the table below, the median fluorescence intensity (MFI) of APC detected from the Raji and the Jurkat cells that were incubated with either neat or concentrated MT103-containing cell culture supernatant, is much higher than the MFI detected from the cells incubated with untransfected cell culture supernatant, indicating that the MT103 TCRA binds to the CD19- and CD3-expressing cells.

Flow Cytometry Data for Cells Treated with the MT103 (CD19×CD3) TCRA

| | MFI of |
|---|---|
| | APC + |
| Sample | Cells |
| Raji cells stained with anti-FLAG-APC | 1021 |
| antibody only | |
| Raji cells stained with untransfected supernatant | 1064 |
| Raji cells stained with neat | 6334 |
| MT103-containing supernatant | |
| Raji cells stained with concentrated | 14544 |
| MT103-containing supernatant | |
| Jurkat cells stained with anti-FLAG-APC | 1035 |
| antibody only | |
| Jurkat cells stained with untransfected supernatant | 996 |
| Jurkat cells stained with neat | 4062 |
| MT103-containing supernatant | |
| Jurkat cells stained with concentrated | 12538 |
| MT103-containing supernatant | |

[1613] Additionally, the CD19×CD3 MT103 TCRA construct was tested in a co-culture of Raji and Jurkat-Lucia™ NFAT cells. The Jurkat-Lucia™ NFAT reporter cell line contains an NFAT-inducible Lucia™ construct, where expression of Lucia™ luciferase is driven by an ISG54 minimal promoter, fused to six copies of the NFAT (nuclear factor of activated T-cells; a transcription factor) consensus transcriptional response element. The Jurkat-Lucia™ NFAT cells, thus, can be used to study NFAT activation by monitoring Lucia™ luciferase activity; the levels of Lucia™ luciferase can be measured in the cell culture supernatant with QUANTI-Luc™, a Lucia™ luciferase detection reagent. In this experiment, the binding of the MT103 TCRA to both the CD19-expressing Raji cells, and the CD3-expressing Jurkat cells, activates the Jurkat cells (T-cells), resulting in NFAT-inducible Lucia™ luciferase secretion, which can be measured to determine the level of activation of the Jurkat cells.

[1614] Jurkat cells were seeded at 5e4 cells per well in a 96-well tissue culture plate. Raji cells were seeded at either 1e5 or 5e4 cells per well, for an Effector:Target (Jurkat:Raji) ratio of 1:2 or 1:1, respectively. The co-cultured cells were incubated with and without the neat or concentrated MT103-containing cell culture supernatant. 10-fold, 100-fold, and 1000-fold dilutions of the neat or concentrated supernatant were prepared and incubated with the co-cultures. The luminescence (i.e., secreted Lucia™ luciferase activity) resulting from the induced NFAT reporter was detected at 6 hours and 24 hours post-addition of the TCRA to the co-cultures.

[1615] The results are summarized in the table below, which shows that the activity of the MT103 TCRA results in increased luminescence from the Jurkat-Lucia™ NFAT reporter cell line, compared to the control samples without the addition of MT103, and to the control samples without the co-culture with Raji (target) cells. The luminescence resulting from the NFAT-inducible Lucia™ reporter construct decreases with the dilution of MT103, in a dose-dependent manner. A longer incubation time (24 hours vs. 6 hours) results in increased luminescence, as expected, which is indicative of increased T-cell activation. PGP-117T2

NFAT-Lucia™ Reporter Values from Co-Cultures of Jurkat and Raji Cells Treated with Different Concentrations of MT103, and with Different Effector:Target Ratios

| | | MT103 | | | |
|---|---|---|---|---|---|
| MT103 Neat | | Concentrated | | No MT103 | |
| Mean | ±SD | Mean | ±SD | Mean | ±SD |

1:2 Effector:Target (Jurkat:Raji) Ratio, 6 Hour Incubation

| | | | | | | |
|---|---|---|---|---|---|---|
| No dilution | 12110.5 | 837.9 | 3445.0 | 717.0 | 44.5 | 10.6 |
| 10-fold dilution | 4285.0 | 209.3 | 5880.0 | 581.2 | 70.0 | 15.6 |
| 100-fold dilution | 2253.5 | 507.0 | 3415.5 | 161.9 | 48.0 | 36.8 |
| 1000-fold dilution | 270.0 | 110.3 | 954.5 | 10.6 | 37.0 | 0.0 |
| No Raji (target) cells | 63.0 | 5.7 | 55.5 | 16.3 | 37.0 | 21.2 |

1:1 Effector:Target (Jurkat:Raji) Ratio, 6 Hour Incubation

| | | | | | | |
|---|---|---|---|---|---|---|
| No dilution | 4337.0 | 219.2 | 2057.5 | 20.5 | 26.0 | 15.6 |
| 10-fold dilution | 2113.0 | 36.8 | 2767.5 | 41.7 | 78.0 | 15.6 |
| 100-fold dilution | 965.5 | 26.2 | 1620.5 | 241.1 | 48.0 | 15.6 |
| 1000-fold dilution | 188.5 | 5.0 | 566.0 | 46.7 | 41.0 | 15.6 |
| No Raji (target) cells | 63.0 | 5.7 | 55.5 | 16.3 | 37.0 | 21.2 |

1:2 Effector:Target (Jurkat:Raji) Ratio, 24 Hour Incubation

| | | | | | | |
|---|---|---|---|---|---|---|
| No dilution | 47159.5 | 1038.7 | 11274.0 | 408.7 | 114.5 | 57.3 |
| 10-fold dilution | 12843.5 | 1047.2 | 13995.5 | 225.6 | 159.5 | 26.2 |
| 100-fold dilution | 5114.0 | 21.2 | 8767.5 | 204.4 | 189.0 | 36.8 |
| 1000-fold dilution | 562.5 | 94.0 | 1979.5 | 57.3 | 148.0 | 62.3 |
| No Raji (target) cells | 159.0 | 67.9 | 181.5 | 5.0 | 77.5 | 4.95 |

1:1 Effector:Target (Jurkat:Raji) Ratio, 24 Hour Incubation

| | | | | | | |
|---|---|---|---|---|---|---|
| No dilution | 18614.0 | 1540.1 | 6017.0 | 31.3 | 122.0 | 15.6 |
| 10-fold dilution | 7083.0 | 209.3 | 7479.0 | 717.0 | 181.5 | 26.2 |
| 100-fold dilution | 2908.5 | 41.7 | 5210.5 | 72.9 | 174.0 | 15.6 |
| 1000-fold dilution | 444.0 | 9.9 | 1213.5 | 94.0 | 163.0 | 52.3 |
| No Raji (target) cells | 159.0 | 67.9 | 181.5 | 5.0 | 77.5 | 4.95 |

SD = standard deviation

[1616] A cytotoxicity assay was performed using a co-culture of human CD8⁺ T-cells and Raji cells (Burkitt's lymphoma cells; i.e., tumor cells). Human CD8⁺ T-cells were isolated using the EasySep™ Human T-cell Isolation Kit (StemCell Technologies), and then were resuspended in RPMI+2% FBS, and seeded in a 96-well plate. CD8⁺ T-cells were seeded at 1e5 cells per well, or at 5e4 cells per well, and Raji cells were seeded at 10,000 cells per well, for Effector:Target (T-cell:Raji cell) ratios of 10:1 or 5:1, respectively. Concentrated or neat MT103-containing supernatant was diluted 10-fold, 100-fold, and 1000-fold, in RPMI+2% FBS, and then 50 μL of each supernatant sample was added to the co-cultures. The supernatant was collected after 5 hours of co-culture incubation, and analyzed using the CytoTox 96® Non-Radioactive Cytotoxicity Assay (Promega), per the manufacturer's instructions. The % cytotoxicity was calculated according to the manufacturer's instructions.

[1617] As shown in the table below, higher amounts (concentrations) of MT103 result in higher % cytotoxicity. The % cytotoxicity decreases as the MT103-containing supernatant is diluted 10-fold, 100-fold, and 1000-fold, in a dose dependent manner.

Lysis of Raji Cells (% Cytotoxicity) in Co-Culture with CD8⁺ T-Cells and Varying Concentrations of MT103

| MT103 Neat | | MT103 Concentrated | | No MT103 | |
|---|---|---|---|---|---|
| Mean | ±SD | Mean | ±SD | Mean | ±SD |

5:1 Effector:Target (CD8⁺ T-Cell:Raji Cell) Ratio, 5 Hour Incubation

| | | | | | | |
|---|---|---|---|---|---|---|
| No dilution | NA | NA | NA | NA | 28.2 | 1.63 |
| 10-fold dilution | 59.0 | 9.6 | 78.8 | 7.5 | NA | NA |
| 100-fold dilution | 36.0 | 5.1 | 54.5 | 6.4 | NA | NA |
| 1000-fold dilution | 3.7 | 3.6 | 32.8 | 2.4 | NA | NA |

10:1 Effector:Target (CD8⁺ T-Cell:Raji Cell) Ratio, 5 Hour Incubation

| | | | | | | |
|---|---|---|---|---|---|---|
| No dilution | NA | NA | NA | NA | 18.0 | 1.0 |
| 10-fold dilution | 51.9 | 5.4 | 77.6 | 1.6 | NA | NA |
| 100-fold dilution | 38.5 | 2.6 | 51.9 | 2.2 | NA | NA |
| 1000-fold dilution | NA | NA | 16.8 | 2.2 | NA | NA |

SD = Standard deviation;
NA = not applicable

### Example 35

### Immunostimulatory Bacterial Delivery of Tumor-Associated Antigens Encoded in Expression Plasmids

[1618] This Example describes exemplary tumor-associated antigens (TAAs) that can be delivered by the immunostimulatory bacteria. Upon treatment with the engineered immunostimulatory bacteria, the delivery of tumor-associated antigens to tumor-resident myeloid cells, such as macrophages and dendritic cells, allows for the priming and activation of antigen-specific T-cells to result in an anti-tumor response.

[1619] Among the tumor-associated antigens encoded by the plasmids in the immunostimulatory bacteria are those categorized as oncofetal or oncoviral. Some of the antigens are either overexpressed by, or they accumulate in tumors. The antigens include those that are lineage-restricted, mutated, or post-translationally altered. Non-limiting examples of tumor-associated antigens in each of these categories, and their associated cancer types (indications), are set forth in the following table.

| Category of | | |
|---|---|---|
| Tumor-Associated | | |
| Antigen (TAA) | Name/Family Name of TAA | Cancer Histology |
| Oncofetal | Carcinoembryonic antigen | Colorectal carcinoma |
| | (CEA) | |
| | Immature laminin receptor | Renal cell carcinoma (RCC) |
| | Tumor-associated glycoprotein | Prostate carcinoma |
| | 72 (TAG-72) | |
| Oncoviral | HPV E6, HPV E7 | Cervical carcinoma |
| Overexpressed/ | BING-4 | Melanoma |
| Accumulated | Epidermal Growth Factor | Colorectal carcinoma (CRC) |
| | Receptor (EGFR) | |
| | Wilms' Tumor Protein | Multi |
| | Calcium-activated chloride | Lung carcinoma |
| | channel 2 | |
| | Cyclin-B1 | Multi |
| | 9D7 | RCC |
| | Epithelial cell adhesion | Breast carcinoma |
| | molecule (EpCAM) | |
| | Ephrin type-A receptor 3 | Multi |
| | (EphA3) | |
| | Human epidermal growth factor | Multi |
| | receptor 2 (HER2/Neu) | |
| | Telomerase | Multi |
| | Mesothelin | Ductal pancreatic carcinoma |
| | Stomach-cancer-associated | Colorectal carcinoma (CRC) |
| | protein tyrosine phosphatase 1 | |
| | (SAP-1) | |
| | Survivin | Multi |
| Cancer-Testis | BAGE (B melanoma antigen) | Multi |
| | family | |
| | CAGE family | Multi |
| | GAGE family | Multi |
| | MAGE (melanoma antigen) | Multi |
| | family | |
| | SAGE (sarcoma antigen) family | Multi |
| | PAGE family | Multi |
| | XAGE family | Multi |
| | CT9, CT10 | Multi |
| | New York esophageal | Multi |
| | squamous cell carcinoma 1 | |
| | (NY-ESO-1), LAGE-1 | |
| | Preferentially expressed antigen | Multi |
| | in melanoma (PRAME) | |
| | synovial sarcoma/X breakpoint | Melanoma, Multi |
| | 2 (SSX-2) | |
| Lineage-Restricted | Melanoma antigen recognized | Melanoma |
| | by T-cells 1 | |
| | (Melan-A/MART-1) | |
| | gp100/Pmel17 | Melanoma |
| | Tyrosinase | Melanoma |
| | Tyrosinase related protein | Melanoma |
| | (TRP)-1, TRP-2 | |
| | P.polypeptide | Melanoma |
| | Melanocortin 1 receptor | Melanoma |
| | (MC1R) | |
| | Prostate-specific antigen (PSA) | Prostate carcinoma |
| Mutated | β-catenin | Melanoma, Prostate carcinoma, |
| | | Hepatocellular carcinoma |
| | | (HCC) |
| | BRCA1, BRCA2 | Breast carcinoma, ovarian |
| | | carcinoma |
| | Cyclin dependent kinase 4 | Multi |
| | (CDK4) | |
| | Chronic Myelogenous | Chronic myelogenous leukemia |
| | Leukemia Tumor Antigen 66 | (CML) |
| | (CML66) | |
| | Fibronectin | Multi |
| | Melanoma antigen recognized | Melanoma |
| | by T-cells 2 | |
| | (MART-2) | |
| | p53 | Multi |
| | Ras | Multi |
| | TGF-β receptor type II | Colorectal carcinoma |
| | (TGF-βRII) | |
| Post- | Mucin 1, Cell Surface | Ductal carcinoma, RCC |
| Translationally | Associated (MUC1) | |
| Altered | | |
| Idiotypic | Immunoglobulin (Ig), T-cell | B-cell leukemia, T-cell |
| | Receptor (TCR) | leukemia, lymphoma, myeloma |

### Example 36

### Ectopic Protein Synthesis in Eukaryotic Cells from Bacterial-Derived RNA Delivery

[1620] As described in the detailed description, in addition to plasmid DNA delivery, immunostimulatory bacterial can be used to directly deliver bacterial-derived RNA, such as mRNA, into infected myeloid cells. Direct delivery of RNA obviates the need for plasmid DNA delivery, which relies on the eukaryotic transcription and translation machinery, as well as proper trafficking of plasmid DNA to the host cell nucleus. Direct delivery of RNA, such as mRNA, bypasses host trafficking and transcriptional processes, to rely only on eukaryotic translation machinery for protein production. The delivery of bacterial-derived RNA requires the de-coupling of bacterial transcription from bacterial translation, in order to prevent problematic translation of foreign proteins in the bacteria. Many eukaryotic proteins are complex proteins that require proper folding conditions, an endoplasmic reticulum, proper post-translational modifications, including disulfide bonds, and host chaperones for folding. Over-expression of foreign proteins in bacteria can reduce strain fitness, decrease doubling time, and reduce strain stability.

[1621] To demonstrate that mRNA delivery occurs during treatment with the immunostimulatory bacteria, a series of plasmids were engineered with either eukaryotic or bacterial promoters driving the expression of mu4-1BBL_T2A_muIL-12p70 HPRE bGHpA, with the presence and absence of an intervening encephalo-myocarditis virus Internal Ribosome Entry Site (EMCV IRES). The EMCV IRES, which is non-functional in bacteria, reduces prokaryotic translation and enhances eukaryotic translation. There is only one known eukaryotic IRES, from the Dicistroviridae family of viruses, that functions in bacteria (see, e.g., Colussi et al. (2015) Nature 519(7541):110-113). Thus, in general, IRES elements do not function in bacteria. The promoter-IRES (or promoter-Kozak) combinations also were cloned into an mCherry fluorescent reporter gene (Takara Bio), so that bacterial expression from the regulatory sequences could be rapidly assessed by fluorescence.

[1622] To measure the bacterial expression of the fluorescent mCherry protein, overnight cultures of bacterial strains were washed in PBS, and normalized by OD₆₀₀ to 0.1. For every bacterial culture, the percentage of mCherry expression was analyzed by flow cytometry using the NovoCyte® Flow Cytometer (ACEA Biosciences, Inc.). The level of ectopic gene expression after bactofection, using a co-culture system of infected primary human M2 macrophages and HEK-Blue™ IL-12 reporter cells (InvivoGen), was measured. HEK-Blue™ IL-12 cells are HEK293 cells that express the IL-12 receptor, as well as genes in the IL-12 signaling pathway, and a STAT4-inducible SEAP reporter gene. The binding of IL-12 to the IL-12 receptor on the surface of HEK-Blue™ IL-12 cells triggers a signaling cascade leading to the activation of STAT-4, with the subsequent production of SEAP. Detection of SEAP in the supernatant of HEK-Blue™ IL-12 cells can be readily assessed using QUANTI-Blue™Solution. Thus, these reporter cells are used to measure the expression of IL-12.

[1623] Primary human monocytes were differentiated in ImmunoCult™-SF Macrophage Medium, containing 100 ng/ml M-CSF, for 3 days, and then supplemented with additional medium containing 200 ng/ml M-CSF, 20 ng/ml IL-4, and 20 ng/ml IL-10, for 4 more days. The cells were then infected with stationary phase immunostimulatory bacteria, which were grown overnight at 37° C. in 4XYT medium, at an MOI of 50. The cells were inoculated with bacteria and centrifuged for 5 minutes at 500 rcf, followed by an incubation at 37° C. for 1 hour. The cells were then washed twice with DPBS, and then incubated in fresh ImmunoCult™-SF Macrophage Medium, containing 100 μg/ml gentamicin, to remove extracellular bacteria. Infected macrophages were then co-cultured with the HEK-Blue™ IL-12 reporter cells, at a ratio of 2.5:1 (macrophages to HEK-Blue™ cells). At 48 hours post-infection, 5 μl of cell culture supernatants were incubated with 180 μl of QUANTI-Blue™ solution (which detects SEAP), and incubated at 37° C., to allow for the color to develop. Thus, the expression of IL-12 by the infected macrophages is assessed by measuring the SEAP levels in the supernatants, which is produced by the HEK-Blue™ cells upon binding of IL-12 to the IL-12 receptor on their cell surfaces.

[1624] The results, which are summarized in the Table below, show that the infected control (EF-1α-NanoLuc® luciferase) stimulates a baseline level of IL-12 expression in primary human M2 macrophages, and very little fluorescence from mCherry expression in the bacteria. The CMV-Kozak pair drives a higher level of IL-12 expression after bactofection, as well as a higher level of mCherry protein expression. This is attributable to the low levels of bacterial “leakiness” that occur from the CMV promoter in bacteria. The two bacterial promoters that were tested, rpsM and MTL, when paired with a Kozak sequence, induce levels of IL-12 expression in primary human M2 macrophages that are lower than the CMV promoter, but higher than EF-1α-NanoLuciferase® control, and both promoters drive a high level of mCherry protein expression in bacteria. These results indicate that mRNA delivery is occurring, because the bacterial promoters are non-functional in eukaryotic hosts. The levels of expression of the IL-12 reporter protein are higher when the bacterial promoters are coupled with an IRES, indicating that protein expression from delivered mRNA is enhanced at the translational level by the presence of a eukaryotic IRES. The presence of an IRES also reduces the amount of mCherry expression in the bacteria, indicating that the secondary structure of the RNA inhibits expression even when coupled with a bacterial promoter.

[1625] Including an IRES in the constructs, downstream from the promoter and before a start codon, inhibits or prevents translation in bacteria, so that the bacteria serve as delivery agents for mRNA. The bacteria, such as the immunostimulatory bacteria provided in this application, are designed to infect host cells, such as tissue-resident macrophages (e.g., tumor-resident myeloid cells), and to deliver the encoded RNA into the host cells. The bacteria can auxotrophic, such as asd⁻, so that they can be grown in vitro, but such that they do no grow when introduced into a host, such as a human. The bacteria deliver their contents to host cells, and do not reproduce.

| | | Promoter- | Absorbance | | Fluorescence |
|---|---|---|---|---|---|
| | | IRES or | (650 nm) | | (mCherry |
| Promoter | | Promoter- | IL-12- | IL-12 | Expression |
| Type | IRES | Kozak | SEAP | Range | in Bacteria) |
| Eukaryotic | No | EF-1α- | 0.4585 | 0.1042 | 0.00403 |
| | | Kozak- | | | |
| | | NanoLuc ® | | | |
| Eukaryotic | No | CMV-Kozak | 0.60545 | 0.1315 | 9.43 |
| Prokaryotic | No | rpsM-Kozak | 0.47785 | 0.0233 | 21.1 |
| Prokaryotic | Yes | rpsM-IRES | 0.5802 | 0.106 | 0.82 |
| Prokaryotic | No | MTL-Kozak | 0.55295 | 0.0757 | 85.8 |
| Prokaryotic | Yes | MTL-IRES | 0.75665 | 0.0801 | 4.19 |

[1626] Bacteria are cultured in vitro to produce encoded RNA, which, because of the presence of an IRES or other such regulatory sequence that prevents or inhibits bacterial translation, results in the production of RNA, such as mRNA by the bacteria. Upon infection of eukaryotic host cells, such as human macrophages, by the bacteria, the RNA is translated, producing the encoded product, such as, for example, an antigen.

[1627] Bacteria are advantageous vessels for RNA delivery, because bacteria readily can be cultured in large amounts, and then stored and/or formulated or provided as powder, a tablet, or a liquid for injection. They can be administered by any suitable route, including intravenously, and mucosally through the nose or lungs. They are very stable, and will provide large, stable quantities of RNA.

[1628] The immunostimulatory bacteria provided herein, when used for the delivery of RNA, such as mRNA, for example, when used as vaccines, or to encode viral antigens and/or other proteins to protect against pathogens, such as Severe Acute Respiratory Syndrome coronavirus 2 (SARS-CoV-2, which causes COVID-19), can encode the full length wild-type SARS-CoV-2 spike protein (see, e.g., SEQ ID NO:438), or can encode the full length receptor binding domain (RBD) of the SARS-CoV-2 spike protein (see, SEQ ID NO:440), or can encode a portion of the spike protein RBD (see, e.g., SEQ ID NO:441) that is sufficient to induce or cause an immune response, and/or to immunize or vaccinate or protect a subject against SARS-CoV-2. The immunostimulatory bacteria also can deliver mRNA encoding mutants of the SARS-CoV-2 spike protein, with mutations in the spike protein or a portion thereof, such as the RBD or a portion thereof, that increase or enhance the expression of the spike protein or RBD or portions thereof, and/or that increase or enhance the binding of the spike protein or RBD, or the portions thereof to the ACE2 receptor.

[1629] The spike protein or spike protein RBD mutants include any described herein and known in the art, including, but not limited to, those comprising the mutations V367F, D614G, G476S, V483A, H49Y, N501Y, N501F, N501W, N501V, F817P, A892P, A899P, A942P, K986P, V987P, V417K, G502D, N501T, Q498Y, W436R and D364Y, and those comprising mutations at residues corresponding to residues N439/R426, L452/R426, T470/N457, E484/P470, Q498/Y484 and N501/T487 of the spike protein or portion thereof. The immunostimulatory bacteria can be used as vaccines against SARS-CoV-2 by delivering mRNA encoding any of the antigenic sequences or modified forms of the SARS-CoV-2 spike protein or RBD, including portions thereof, as described, for example, in U.S. Pat. Nos. 10,973,908 and 10,702,600. The immunostimulatory bacteria also can be used as vaccines/for mRNA delivery, to deliver the mRNA in the Pfizer-BioNTech COVID-19 vaccine, and in the Moderna COVID-19 vaccine, as described elsewhere herein. SARS-CoV-2 proteins for use as antigens, include, for example, spike protein, nucleocapsid and M protein and antigenic portions thereof. The immunostimulatory bacteria can be used to deliver universal flu antigens, such as flu vaccines that elicit antibodies against HA proteins from a variety of flu strains, such as influenza type A strains (H1 and H3) and influenza type B strains. Other combinations include repeating patters of HA epitopes, such as the FlusMos-v1. See, e.g., Nachbaguer et al. (2021) Nature Medicine 27:106-114, which provides a chimeric hemagglutinin-based universal influenza vaccine.

### Example 37

### Immunomodulatory Strains Containing Human IL-15Rα-IL-15sc and huSTING N154S/R284G tazCTT Colonize Autochthonous Murine Tumors

[1630] It previously has been reported that the attenuated Salmonella strain YS1646 is able to colonize tumors in the 4T1 murine breast transplant model (average tumor size 400 mm³, average CFUs/g=10⁸), but is significantly less able to colonize the spontaneous BALB-NeuT breast tumor model (average tumor size 400 mm³, average CFUs/g=10³; see, e.g., Drees et al. (2015) J. Cancer 6(9):843-848).

[1631] In order to show that the immunostimulatory bacteria provided herein do not have a similar deficiency in colonizing spontaneous tumors compared to transplanted tumors, tumors were collected from the orthotopically-transplanted EMT6 mouse model of breast cancer, and compared to tumors collected from the spontaneous MMTV-PyMT breast cancer model. For the EMT6 model, 6-8 week-old female BALB/c mice (5 mice per group) were inoculated orthotopically in the 4^{th} mammary fat pad with EMT6 cells (1×10⁶ cells in 100 μL PBS). Mice bearing 7-day established flank tumors (average tumor size of 56 mm³) were IV injected with a single dose of 3×10⁷ CFUs of the YS1646Δasd/ΔFLG/ΔpagP/ΔansB/ΔcsgD strain, containing a plasmid encoding the combination of huIL-15Rα-IL-15sc+huSTING N154S/R284G tazCTT. At day 4 post-IV dosing, mice were euthanized, and tumors were homogenized and plated on LB plates to enumerate the number of colony forming units (CFUs) per gram of tumor tissue. The YS1646Δasd/ΔFLG/ΔpagP/ΔansB/ΔcsgD strain colonized tumors at a mean of 1.7×10⁷ CFUs per gram of tumor tissue.

[1632] For the spontaneous model of breast cancer, MMTV-PyMT mice were IV injected with 3×10⁷ CFUs of the same bacterial strain when their largest tumors measured an average of 272 mm³ in volume. Tumors were collected at day 6 post-IV dosing. Tumors were homogenized and plated on LB plates to enumerate the number of CFUs per gram of tumor tissue. All tumors collected were found to be well colonized despite a range of tumor weights (0.05 g to 0.36 g, N=7), with a mean of 2.89×10⁶ CFUs/g. These data demonstrate that, unlike the parental YS1646 strain, the immunomodulatory YS1646Δasd/ΔFLG/ΔpagP/ΔansB/ΔcsgD strain, containing the plasmid encoding the combination of huIL-15Rα-IL-15sc+huSTING N154S/R284G tazCTT, was able to colonize spontaneous MMTV-PyMT tumors at a comparable level to the transplanted EMT6 tumors (P=0.18, NS).

[1633] Since, unlike the transplanted tumors, the spontaneous tumors have vasculature that is more comparable to human tumors, these data indicate that the immunostimulatory bacteria will colonize human tumors at a much higher rate/level than the parental YS1646 strain was reported to in a phase I clinical trial of advanced cancer patients (see, e.g., Toso et al. (2002) J. Clin. Oncol. 20(1):142-152).

### Example 38

### Immunomodulatory Bacterial Strains, Containing Plasmids Encoding Human IL-15Rα-IL-15sc and huSTING N154S/R284G tazCTT, or a NanoLuciferase® Luciferase Control Plasmid, are Well Tolerated in Non-Human Primates

[1634] In a phase I human clinical trial, it was reported that the maximum tolerated dose (MTD) of the parental YS1646 strain is 3×10⁸ CFUs/m², and that the dose-limiting toxicity (DLT) dose was 1×10⁹ CFUs/m² (see, e.g., Toso et al. (2002) J. Clin. Oncol. 20(1):142-152). At these doses, the toxicities and adverse events, such as fever, hypotension, thrombocytopenia, anemia, vomiting, diarrhea, nausea, and hypophosphatemia, were attributed to very high serum levels of pro-inflammatory cytokines, measured at 4 hours post-IV dosing, including TNF-α (approximately 500,000 pg/mL), IL-6 (approximately 500,000 pg/mL), and IL-1β (approximately 200 pg/mL). In a separate study, strain YS1646 was evaluated in a non-human primate (NHP) study using cynomolgus monkeys. In this study, 1×10⁹ CFUs/monkey was found to be the MTD (Human Equivalent Dose (HED)=4×10⁹ CFUs/m²), while a dose of 1×10¹⁰ CFUs/monkey was considered not tolerated (HED=4×10¹⁰ CFUs/m²). DLTs at the top dose were attributed to liver-associated adverse events (AEs), and serum cytokines were not measured (see, e.g., Lee et al. (2000) International Journal of Toxicology 19:19-25). Since the NHPs tolerated strain YS1646 much better than the humans, with an MTD value of a log higher than the human MTD, it can be inferred that the cytokine levels of the monkeys would be approximately a log lower than those measured in humans.

[1635] To determine the MTD and serum cytokine profile of immunostimulatory bacteria provided herein, such as strains that lack flagella and that are msbB⁻/pagP⁻, in NHPs, a tolerability study was performed. For this study, 15 previously untreated male cynomolgus monkeys, with ages ranging from 24 to 50 months, were utilized. The NHPs were IV administered the YS1646Δasd/ΔFLG/ΔpagP/ΔansB/ΔcsgD/F-ΔpurI strain (discussed above), containing a plasmid encoding the combination of huIL-15Rα-IL-15sc+huSTING N154S/R284G tazCTT, at doses of 3×10⁸ CFUs/monkey, 1×10⁹ CFUs/monkey, or 3×10⁹ CFUs/monkey (3 NHPs per dosing group), or were IV administered the YS1646Δasd/ΔFLG/ΔpagP/ΔansB/ΔcsgD strain, containing a plasmid encoding NanoLuciferase® luciferase, at a dose of 3×10⁸ CFUs/monkey (3 NHPs per group), and compared to the saline vehicle control group (N=3). The NHPs were bled prior to dosing, 4 hours post-dosing, and 24 hours post-dosing, and serum cytokine levels were measured using a monkey cytokine U-Plex® panel (Meso Scale Discovery), according to the manufacturer's protocol.

[1636] The results, which are summarized in the tables below, show that the bacterial strains were well-tolerated at all dose levels tested, and no clinical findings were reported that differed significantly from the saline (PBS) control group. Thus, no MTD could be established in this study. Serum cytokine levels were very low overall, particularly for the cytokines that were attributed to dose-limiting toxicities (DLTs) in the human clinical trial with strain YS1646, such as the cytokines measured 4 hours post-IV dosing in the 3×10⁹ CFUs/monkey dose group (HED=1.2×10¹⁰ CFUs/m²), including TNF-α (mean concentration of 4.6 pg/mL), IL-6 (mean concentration of 376.9 pg/mL), and IL-1β (mean concentration of 0.88 pg/mL). Only the serum cytokine levels of IP-10/CXCL10 (mean concentration of 10,549.6 pg/mL) and MCP-1/CCL2 (mean concentration of 6247.7 pg/mL) were high in the top dose level group, 4 hours post-dosing, and remained elevated at 24 hours post-dosing. These analytes are not associated with toxicity, and can indicate a more favorable immune profile. In summary, the immunostimulatory bacteria provided herein, including those containing plasmids encoding payloads, are very well-tolerated in NHPs. It can thus be inferred, from these data, that there will be a high level of tolerability of the immunostimulatory bacterial strains in humans.

### Serum Cytokines Levels Prior to Dosing

| | | Immunostimulatory Bacterial Strain and Dose (CFUs/NHP) | | | | |
|---|---|---|---|---|---|---|
| | | | | | | YS1646Δasd/ |
| | | | YS1646Δasd/ΔFLG/ΔpagP/ΔansB/ΔcsgD/ | | | ΔFLG/ΔpagP/ |
| | | | F-ΔpurI + p2.1 CMV VCIP huIL-15Rα- | | | ΔansB/ΔcsgD + |
| | | | IL15sc_T2A_STING N154S/R284G | | | NanoLuc ® |
| | | PBS | tazCTT | | | Plasmid |
| | | Control | 3 × 10⁸ | 1 × 10⁹ | 3 × 10⁹ | 3 × 10⁸ |
| | | — | CFUs/NHP | CFUs/NHP | CFUs/NHP | CFUs/NHP |
| IFN-γ | Mean | 3.87 | 0.24 | 0.80 | 3.78 | 0.00 |
| | (pg/ml) | | | | | |
| | ±SD | 0.00 | 0.00 | 0.78 | 0.00 | 0.00 |
| IL-10 | Mean | 0.08 | 0.03 | 0.05 | 0.09 | 0.08 |
| | (pg/ml) | | | | | |
| | ±SD | 0.06 | 0.02 | 0.03 | 0.02 | 0.02 |
| IL-12p70 | Mean | 0.56 | 0.32 | 1.43 | 1.23 | 0.30 |
| | (pg/ml) | | | | | |
| | ±SD | 0.27 | 0.16 | 1.87 | 1.08 | 0.21 |
| IL-1β | Mean | 0.08 | 0.05 | 0.70 | 0.09 | 0.26 |
| | (pg/ml) | | | | | |
| | ±SD | 0.00 | 0.05 | 1.15 | 0.12 | 0.00 |
| IL-2 | Mean | 0.00 | 2.29 | 0.00 | 17.32 | 0.00 |
| | (pg/ml) | | | | | |
| | ±SD | 0.00 | 0.00 | 0.00 | 0.00 | 0.00 |
| IL-6 | Mean | 0.38 | 0.41 | 1.01 | 2.56 | 0.79 |
| | (pg/ml) | | | | | |
| | ±SD | 0.23 | 0.17 | 0.14 | 4.10 | 0.47 |
| IP-10 | Mean | 605.50 | 639.54 | 813.35 | 766.50 | 684.53 |
| | (pg/ml) | | | | | |
| | ±SD | 154.57 | 54.59 | 248.99 | 297.89 | 46.50 |
| MCP-1 | Mean | 361.83 | 249.90 | 284.35 | 275.21 | 268.46 |
| | (pg/ml) | | | | | |
| | ±SD | 11.71 | 28.90 | 65.43 | 210.65 | 65.80 |
| TNF-α | Mean | 0.33 | 0.41 | 0.83 | 0.37 | 0.45 |
| | (pg/ml) | | | | | |
| | ±SD | 0.15 | 0.48 | 0.55 | 0.13 | 0.00 |
| IL-15 | Mean | 11.39 | 9.05 | 8.25 | 9.54 | 13.03 |
| | (pg/ml) | | | | | |
| | ±SD | 1.52 | 2.29 | 1.31 | 2.64 | 7.02 |

SD = standard deviation

### Serum Cytokine Levels, 4 Hours After Dosing

| | | Immunostimulatory Bacterial Strain and Dose (CFUs/NHP) | | | | |
|---|---|---|---|---|---|---|
| | | | | | | YS1646Δasd/ |
| | | | YS1646Δasd/ΔFLG/ΔpagP/ΔansB/ΔcsgD/ | | | ΔFLG/ΔpagP/ |
| | | | F-ΔpurI + p2.1 CMV VCIP huIL-15Rα- | | | ΔansB/ΔcsgD + |
| | | | IL15sc_T2A_STING N154S/R284G | | | NanoLuc ® |
| | | PBS | tazCTT | | | Plasmid |
| | | Control | 3 × 10⁸ | 1 × 10⁹ | 3 × 10⁹ | 3 × 10⁸ |
| | | — | CFUs/NHP | CFUs/NHP | CFUs/NHP | CFUs/NHP |
| IFN-γ | Mean | 1.35 | 6.87 | 26.49 | 22.62 | 4.03 |
| | (pg/ml) | | | | | |
| | ±SD | 1.09 | 5.48 | 34.96 | 21.59 | 2.51 |
| IL-10 | Mean | 0.068 | 0.481 | 0.508 | 0.586 | 0.387 |
| | (pg/ml) | | | | | |
| | ±SD | 0.050 | 0.149 | 0.125 | 0.269 | 0.113 |
| IL-12p70 | Mean | 0.05 | 0.52 | 1.21 | 1.17 | 0.45 |
| | (pg/ml) | | | | | |
| | ±SD | 0.01 | 0.36 | 1.03 | 1.12 | 0.06 |
| IL-1β | Mean | 0.08 | 0.34 | 0.55 | 0.88 | 0.33 |
| | (pg/ml) | | | | | |
| | ±SD | 0.04 | 0.14 | 0.16 | 0.62 | 0.13 |
| IL-2 | Mean | 0.00 | 0.52 | 0.11 | 10.33 | 0.00 |
| | (pg/ml) | | | | | |
| | SD | 0.00 | 0.00 | 0.00 | 11.24 | 0.00 |
| IL-6 | Mean | 3.0 | 95.3 | 116.7 | 376.9 | 34.8 |
| | (pg/ml) | | | | | |
| | ±SD | 1.4 | 105.3 | 70.7 | 318.1 | 26.4 |
| IP-10 | Mean | 363.0 | 9529.3 | 11838.7 | 10549.6 | 11143.2 |
| | (pg/ml) | | | | | |
| | ±SD | 19.6 | 4596.6 | 82.0 | 2362.7 | 1231.4 |
| MCP-1 | Mean | 475.5 | 5017.5 | 5642.4 | 6247.7 | 3700.4 |
| | (pg/ml) | | | | | |
| | ±SD | 143.0 | 3755.6 | 1622.2 | 2492.8 | 2209.3 |
| TNF-α | Mean | 0.1 | 1.8 | 3.4 | 4.6 | 1.1 |
| | (pg/ml) | | | | | |
| | ±SD | 0.1 | 1.5 | 0.2 | 4.1 | 0.5 |
| IL-15 | Mean | 12.73 | 14.45 | 14.84 | 15.32 | 14.9 |
| | (pg/ml) | | | | | |
| | ±SD | 2.5 | 4.07 | 3.29 | 3.91 | 3.48 |

SD = standard deviation

### Serum Cytokine Levels, 24 Hours After Dosing

| | | Immunostimulatory Bacterial Strain and Dose (CFUs/NHP) | | | | |
|---|---|---|---|---|---|---|
| | | | | | | YS1646Δasd/ |
| | | | YS1646Δasd/ΔFLG/ΔpagP/ΔansB/ΔcsgD/ | | | ΔFLG/ΔpagP/ |
| | | | F-ΔpurI + p2.1 CMV VCIP huIL-15Rα- | | | ΔansB/ΔcsgD + |
| | | | IL15sc_T2A_STING N154S/R284G | | | NanoLuc ® |
| | | PBS | tazCTT | | | Plasmid |
| | | Control | 3 × 10⁸ | 1 × 10⁹ | 3 × 10⁹ | 3 × 10⁸ |
| | | — | CFUs/NHP | CFUs/NHP | CFUs/NHP | CFUs/NHP |
| IFN-γ | Mean | 0.71 | 0.79 | 1.65 | 3.32 | 6.63 |
| | (pg/ml) | | | | | |
| | ±SD | 0.83 | 0.51 | 2.15 | 3.13 | 0.97 |
| IL-10 | Mean | 0.0577 | 0.0906 | 0.0672 | 0.0988 | 0.1000 |
| | (pg/ml) | | | | | |
| | ±SD | 0.0362 | 0.0428 | 0.0629 | 0.0631 | 0.0617 |
| IL-12p70 | Mean | 0.25 | 0.35 | 0.98 | 2.51 | 0.31 |
| | (pg/ml) | | | | | |
| | ±SD | 0.03 | 0.22 | 1.38 | 2.50 | 0.11 |
| IL-1β | Mean | 0.02 | 0.02 | 0.36 | 0.15 | 0.09 |
| | (pg/ml) | | | | | |
| | ±SD | 0.02 | 0.00 | 0.57 | 0.04 | 0.03 |
| IL-2 | Mean | 0.00 | 0.00 | 0.00 | 3.19 | 0.00 |
| | (pg/ml) | | | | | |
| | ±SD | 0.00 | 0.00 | 0.00 | 0.00 | 0.00 |
| IL-6 | Mean | 0.6 | 8.0 | 5.3 | 19.8 | 3.0 |
| | (pg/ml) | | | | | |
| | ±SD | 0.2 | 1.9 | 3.0 | 17.4 | 0.7 |
| IP-10 | Mean | 475.6 | 1579.7 | 2354.0 | 3638.2 | 2762.1 |
| | (pg/ml) | | | | | |
| | ±SD | 180.7 | 339.5 | 1475.8 | 4036.5 | 1752.8 |
| MCP-1 | Mean | 266.5 | 340.1 | 258.2 | 525.7 | 393.1 |
| | (pg/ml) | | | | | |
| | ±SD | 5.9 | 39.9 | 41.2 | 285.5 | 270.7 |
| TNF-α | Mean | 0.1 | 0.2 | 0.4 | 0.4 | 0.5 |
| | (pg/ml) | | | | | |
| | ±SD | 0.1 | 0.0 | 0.3 | 0.2 | 0.6 |
| IL-15 | Mean | 11.09 | 16.07 | 12.17 | 15.87 | 18.63 |
| | (pg/ml) | | | | | |
| | ±SD | 2.51 | 4.26 | 1.56 | 4.83 | 2.81 |

SD = standard deviation

### Example 39

### Thymidine Auxotroph strains

[1640] The Salmonella typhimurium essential gene thyA encodes thymidylate synthase, a key enzyme in DNA synthesis. Deletion or mutation of the gene renders the strain auxotrophic for thymidine. Upon deprivation of the complementing substrate, bacterial cell death occurs and it has been demonstrated that no macromolecules are released from thyA mutants upon thymidine starvation (Loessner el al., FEMS Microbiol Lett. 265(1): 81-88 (2006)), reducing potential release of PAWPs and subsequent activation of innate inflammatory responses. To generate a thymidine auxotroph that is incapable of replication in vivo and rapidly dies in the absence of supplemented thymidine, thyA was deleted from strain YS 1646Δasd/ΔFLG/ΔpagP/ΔansB/ΔcsgD/F-ΔpurI.

[1641] A 690 bp region containing the thyA gene (SEQ ID NO: 464; DC51_3078), was targeted for deletion using modifications of the method of Datsenko and Wanner (Proc. Natl. Acad. Sci. U.S.A. 97:6640-6645 (2000)). To disrupt thyA gene, a thyA gene knockout cassette was constructed by overlapping PCR. This cassette contains a Kanamycin resistance (Kan^{R}) cassette flanked by two I-SceI cut site, and homologous regions on both the 5′ end (345 bp) and 3′ end (332 bp) to facilitate recombination. Immediately 5‘ of the Kan’ cassette there is 75 bp of DNA sequence that is perfectly homologous to 75 bp on the 3′ of the Kan^{R} cassette. This repeat element (thyA MHA) leaves a scarless deletion upon excision of the Kan^{R} cassette.

[1642] Specifically, with reference to the sequences in the table below, the thyA left homology arm sequence was amplified from YS1646 using primers thya-1 and thya-2, was PCR overlapped with a Kan^{R} cassette using primers thya-1 and scFv-thyA right homology arm sequence amplified from YS 1646 using primer thya-3 and thya-4, was PCR overlapped with thyA MHA (prepared as a synthetic gBlock gene fragment from a supplier (IDT) using primer loxp-4 and thya-4).

TABLE 3
thyA gene KO homology arm length information

| | Homology arm length | |
|---|---|---|
| Gene name | LHA | RHA |
| thyA (SEQ ID | 345 bp (PCR amplified | 332 bp (PCR amplified |
| NO: 464_ | from VNP20009) | from VNP20009) |

TABLE 4
thyA KO primer sequence information

| | | | | SEQ ID |
|---|---|---|---|---|
| Gene | Primer | Primer sequence | Primer description | NO. |
| thyA | thya-1 | ccttcccagttgtatgagttggc | Forward primer amplifying thy A | 471 |
| | | | LHA and KO cassette | |
| | thya-2 | CTGTTATCCCTAgaagcagctc | Reverse primer amplifying thy A | 472 |
| | | cagcctacacctgtgtgccttcatccagc | LHA | |
| | | a | | |
| | thya-3 | gatgaaggcacacagtgaaattgaaggc | Forward primer amplifying thy A | 473 |
| | | tatgatccgcac | RHA | |
| | thya-4 | gttgccagccataaagtcctgtg | Reverse primer amplifying thy A | 474 |
| | | | RHA and KO cassette | |
| | thya-5 | ccatgctctttcctggctca | fwd primer checking thy A KO | 475 |
| | thya-6 | ctgacaaagcaccatgaaccg | rev primer checking thy A KO | 476 |
| | FRT-3 | gtgtaggctggagctgcttc | Fwd primer amplifying Kan gene | 477 |
| | | | cassette | |
| | loxp-4 | ggcttcccaaccttaccagag | Fwd primer for overlapping thy A | 478 |
| | | | MHA and RHA | |
| | scFv-3 | cataatctgggtccttggtctgc | Reverse primer for amplifying | 223 |
| | | | Kan gene cassette and for | |
| | | | overlapping Kan gene cassette | |
| | | | with thy A LHA | |

>thyA MHA gBlock fragment
Note:
thyA KO middle homology arm
(ggcttcccaaccttaccagagggcgccccagctggcaattccgGGTACCggcaagTAGGGATAACAGGGTAATgttaTCTGCAgaccaaggacccagattatgcagcaacacgtttcctgaggaaccatgaaacagtatttagaactgatgcaaaaagtgctggatgaaggcacacagtgaaattgaaggctatgatccgcac; SEQ ID NO: 479) was used for the lambda red recombination step during Kan gene removal using I-SceI.

[1643] The full length thyA gene knockout cassette then was constructed by overlap PCR using primers thya-land thya-4 (see above Table), gel purified, and introduced into strain YS1646Δasd/ΔFLG/ΔpagP/ΔansB/ΔcsgD/F-ΔpurI carrying the temperature sensitive lambda red recombination plasmid pSL0304 by electroporation. The kanamycin resistance gene then was cured by I-SceI/lambda red mediated recombination as previously described Yang and Yang (Applied and Environmental Microbiology, 80: 3826-3834 (2014)), and the temperature-sensitive plasmids were cured by growth at non-permissive temperature. The thyA gene fragment knockout sequence was confirmed by PCR using primers thya-5 and thya-6 (Table 2), and verified by DNA sequencing. The resulting mutant derivative of parental strain, YS1646Δasd/ΔFLG/ΔpagP/ΔansB/ΔcsgD/F-ΔpurI, was designated YS1646Δasd/ΔFLG/ΔpagP/ΔansB/ΔcsgD/F-ΔpurI/ΔthyA.

[1644] Thymidine deletion strains were grown in a DasGip fermentation system supplemented with 250 μg/mL thymidine for 6 hours and culture material was subsequently processed for injection stocks. YS1646Δasd/ΔFLG/ΔpagP/ΔansB/ΔcsgD/F-ΔpurI/ΔthyA was cultured in the presence of 250 μg/mL thymidine (Sigma Aldrich T1895-1G) and 50 μg/mL diaminopimelic acid to generate electrocompetent cells. YS1646Δasd/ΔFLG/ΔpagP/ΔansB/ΔcsgD/F-ΔpurI/ΔthyA was transformed with plasmids designated ADN-86, ADN-870 or ADN-872, to generate strains STST-321, STST-326 and STST-328 (see table below), respectively. YS1646Δasd/ΔFLG/ΔpagP/ΔansB/ΔcsgD/F-ΔpurI/ΔthyA strains, designated STST-321, STST-326 and STST-328 containing the noted plasmids (see Table below), were grown in a DasGip fermentation system at 1L scale for 6 hrs in the presence of 250 μg/mL thymidine in parallel with CRST-2000, YS1646Δasd/ΔFLG/ΔpagP/ΔansB/ΔcsgD/F-ΔpurI (resulting strain designated test strain 4, for example in the table below) bearing a plasmid comprising the sequence set forth in SEQ ID NO:501, tested in the absence of thymidine supplementation.

| | | |
|---|---|---|
| STST-321 | 1 | PurI del-CsgD-ThyA-pATI1.76 MTL EMCV IRES Ovalbumin-SIY Myc HPRE |
| | | bGHpA-ADN-865 |
| STST-326 | 2 | PurI del-CsgD-ThyA-pATI1.76 MTL EMCV IRES tPA leader 4xSIINFEKYL |
| | | HPRE bGHpA-ADN-870 |
| STST-328 | 3 | PurI del-CsgD-ThyA-pATI1.76 MTL tPA leader 4xSIINFEKYL HPRE bGHpA-ADN-872 |
| CRST- | 4 | PurI del-CsgD-pATI2.1 CMV VCIP IRES huIL-15cplex T2A hSTINGtCTT N154S + |
| 2000 | | R284G HPRE bGHpA-ADN-838 |

[1645] The strain referred to as “CRST-2000,” includes a plasmid that comprises nucleic acid having the sequence set forth in SEQ ID NO:501. SEQ ID NO:501 sets forth the sequence of a construct that contains a high-copy number ColE1/pMB1/pBR322/pUC origin of replication (nucleotides 822-1410); a CMV enhancer (nucleotides 1704-2007); a CMV promoter (nucleotides 2008-2211); a VCIP IRES (nucleotides 2256-2802); human IL-15 complex (in which nucleotides 2803-3126 are human IL-15Rαleader+sushi, nucleotides 3127-3186 are a (Gly4-Ser)4 linker, and nucleotides 3187-3531 are human IL-15 extracellular); a T2A sequence (nucleotides 3541-3594); human STING with the N154S/R284G mutations and a Tasmanian devil CTT (nucleotides 3595-4731); an HPRE (nucleotides 4741-5274); a bGH poly(A) signal (nucleotides 5283-5507); and asd (nucleotides 5858-6297 and 1-736). SEQ ID NOs:546 and 547 set forth the nucleotide sequence of the STING N154S/R284G Tasmanian devil CTT and human IL-15 complex, respectively. The amino acid sequence of a human STING protein with the N154S/R284G mutations and a Tasmanian devil CTT is set forth in SEQ ID NO:500. The amino acid sequence of the human IL-15 complex in the construct is set forth in SEQ ID NO:548.

[1646] Fermentation culture was analyzed for OD₆₀₀ throughout the fermentation. The growth of the thymidine deletion strains were observed to be comparable to the CRST-2000 control. To confirm thymidine auxotrophy, growth of strains STST-321, STST-326 and STST-328 was evaluated in medium with or without 250 μg/mL thymidine supplementation in comparison to control CRST-2000. Injection stocks were thawed at room temperature and 2.5 μL was used to inoculate 250 μL media+/−thymidine in triplicate wells in a clear bottom 96-well plate; growth was evaluated for 12 hours, shaking at 37° C., by OD600 in a SpectraMax® microplate reader (Molecular Devices). Thymidine deletions strains were grown in broth with or without 250 μg/mL thymidine supplementation, and OD₆₀₀ was monitored in 15 minutes intervals over the course of 12 hours.

[1647] The results show that no growth was observed for STST-321, STST-326 and STST-328 in the absence of thymidine supplement, while CRST-2000 demonstrated robust growth to stationary phase. In the presence of 250 μg/mL thymidine supplementation, STST-321, STST-326 and STST-328 grew to stationary phase with a growth profile similar to CRST-2000, demonstrating precise and controlled auxotrophy for thymidine.

[1648] Bacterial strains, such as these strains, have a variety of advantageous effects, detailed throughout the disclosure herein, upon administration. See, for example, FIG. 17F, which shows that immunostimulatory bacteria provided herein act as a comprehensive immunotherapy.

### Example 40

### Optimized Expression of IRF3, IFNα2, and IFN-β Expression Cassettes

[1649] Plasmids containing combinations of human IRF3 S396D or mouse IRF3 S388D, or human or mouse IFNα2, or human or mouse IFN-0, where the bi-cistronic constructs contain T2A peptides, were tested for expression of each encoded payload/product against single expresser controls.

[1650] HEK293T STING Null Cells (293-Dual™ Null Cells; InvivoGen), which do not contain endogenous STING, and express secreted embryonic alkaline phosphatase (SEAP), placed under the control of the endogenous IFN-stimulated response element (ISRE) promoter, where the coding sequence of ISRE is replaced by the SEAP ORF using knock-in technology, were used. STING activity, thus, is assessed by monitoring type I IFN induced SEAP production. The 293-Dual™ Null cells also express Lucia™ luciferase, a secreted luciferase, placed under the control of the endogenous IFN-β promoter; the coding sequence of IFN-β has been replaced by the Lucia™ luciferase ORF using knock-in technology. This allows for the assessment of STING activity by monitoring the expression of IFN-β. Using these cells, STING activity can be assessed by monitoring ISRE-induced SEAP production and/or IFN-β-dependent expression of Lucia™ luciferase. The two reporter proteins, SEAP and Lucia™ Luciferase, can be measured in the cell supernatant using standard assays and detection reagents, such as the QUANTI-Blue™ and QUANTI-Luc™ detection reagents (InvivoGen), respectively.

[1651] The cells were seeded in 24-well plates coated with poly-L-lysine at 200,000 cells per well, and incubated overnight at 37° C. in a 5% CO₂ incubator, to achieve 80% confluency. The following day, 300 ng of each plasmid DNA, and 40 ng of a CMV-GFP vector (i.e., a vector encoding green fluorescent protein under the control of a CMV promoter), were diluted in serum-free media and added to FuGENE® transfection reagent (Promega), at the proper reagent:DNA ratios, with untransfected wells serving as negative controls (in duplicates). Cell culture supernatants from each sample were collected 48 hours post-transfection.

[1652] The activity of the constructs were evaluated using the ISRE-SEAP and IFN-β-Lucia™ reporter systems. The type I interferon (IFN) activity was assessed by monitoring type I IFN-stimulated SEAP production in the cell supernatants. 20 μL of cell culture supernatant was added to 180 μL of QUANTI-Blue™ reagent (InvivoGen), which is used for measuring SEAP. Type I interferon activation was determined by measuring ISRE-induced SEAP activity on a SpectraMax® M3 Spectrophotometer (Molecular Devices), at an absorbance wavelength of 650 nm. The type I interferon (IFN) activity also was assessed by monitoring the type I IFN-stimulated Lucia™ luciferase production in the cell supernatants. 20 μL of cell culture supernatant was added to 50 μL of QUANTI-Luc™ reagent (InvivoGen), which is used for measuring Lucia™ luciferase activity. Type I interferon activation was determined by measuring IFNβ-induced Lucia™ luciferase activity on a SpectraMax® M3 Spectrophotometer (Molecular Devices), on the luminescence setting.

### A. Cytokines Resulting from Transfection of Mouse IRF3, IFNα2, and IFNb in BMDCs

[1653] Various single expressing plasmids and combination plasmids containing mouse IRF3 S388D, mouse IFNα2, mouse IFN-β were compared to the hSTING N154S/R284G tazCTT plasmid. The expression results are provided in the table below. ISRE-SEAP reporter activity is higher than hSTING N154S/R284G tazCTT in all of the human constructs, as well as mIFNα2 T2A mIRF3 S388D and mIRF3 S388D T2A mIFNα2. IFNβ-Lucia reporter activity is higher than hSTING N154S/R284G tazCTT for the phosphomimetic hIRF3 alone, hIFNα2 T2A hIRF3 S388D and hIRF3 S388D T2A hIFNα2. These results demonstrate high levels of type I IFN production can be induced through expressing individual type I IFN signaling components, as well as combinations of constitutive type I IFN signaling components.

### Mouse and Human IRF3, IFNα2, and IFN-β Expression Normalized by Transfection Efficiency

| | ISRE-SEAP | | IFNβ-Lucia | |
|---|---|---|---|---|
| | (Absorbance/% GFP) | | (Luminescence/% GFP) | |
| | Mean | ±SD | Mean | ±SD |
| Untransfected | ND | ND | ND | ND |
| 1.76 CMV huSTING | 0.0228583 | 0.00085119 | 11.2064602 | 0.45461337 |
| tazCTT DM | | | | |
| 1.76 CMV mIFNα2 | 0.03989167 | 0.00145511 | 0.32920588 | 0.28396577 |
| 1.76 CMV mIFN-β | ND | ND | ND | ND |
| 1.76 CMV mIRF3 | 0.01381649 | 0.00062722 | 5.20826023 | 0.36717461 |
| S388D | | | | |
| 1.76 CMV mIFNα2 T2A | 0.01767895 | 0.00052589 | ND | ND |
| mIFN-β | | | | |
| 1.76 CMV muIFNα2 | 0.02566539 | 0.00030503 | 6.64847586 | 1.66829016 |
| T2A muIRF3 S388D | | | | |
| 1.76 CMV muIRF3 | 0.03512478 | 0.0016182 | 6.37450819 | 1.35199207 |
| S388D T2A muIFNα2 | | | | |
| 1.76 CMV huIFNα2 | 0.05600093 | 0.0009781 | 0.8808781 | 0.67044592 |
| 1.76 CMV huIRF3 | 0.03945822 | 0.00031064 | 42.716536 | 4.91527029 |
| S396D | | | | |
| 1.76 CMV huIFN-β | 0.06714092 | 0.00393377 | 1.86574208 | 0.47553008 |
| 1.76 CMV huIFNα2 T2A | 0.05854426 | 0.00151915 | 1.00891248 | 0.73015436 |
| huIFN-β | | | | |
| 1.76 CMV huIFNα2 T2A | 0.06245151 | 0.0015994 | 18.8868229 | 2.54040139 |
| huIRF3 S396D | | | | |
| 1.76 CMV huIRF3 | 0.06495505 | 0.00023288 | 18.8039985 | 3.32761255 |
| S396D T2A huIFNα2 | | | | |

[1655] B. Plasmids containing combinations of human IRF3 S396D or mouse IRF3 S388D, or human or mouse IFNα2, or human or mouse IFN-β, and combinations thereof, where the bi-cistronic constructs contain T2A peptides, were tested for expression by transfection in murine primary bone marrow-derived dendritic cells (BMDCs).

[1656] To test these, Golden Ticket murine bone marrow was isolated and flushed into 1.5 mL Eppendorf tubes, and spun at 1200 RPM for 5 minutes, to collect the bone marrow cells. Cells were washed once in RPMI-1640+10% FBS, then seeded in 96-well TC-treated plates in RPMI-1640+10% FBS with 20 ng/ml GM-CSF. After four days, non-adherent cells were pipetted off the wells and re-seeded at 2e5 cells per well in RPMI-1640+10% FBS in a 96-well plate for transfection. Cells were transfected using Viromer® RED, according to the manufacturer's instructions. Briefly, 300 ng of plasmid DNA, as well as a “No DNA” control, were diluted in the provided buffer, and mixed with 0.08 μL of Viromer® RED and incubated at room temperature for 15 minutes to allow the DNA/Viromer® RED complexes to form. The DNA/Viromer® RED complexes were then slowly added to each well of the 96-well plate (in duplicates), and the plate was incubated at 37° C. in a CO₂ incubator. Supernatants were harvested at 48 hours, and assayed for murine IFNα, IFN-β, CXCL10 (IP-10), and IL-6 using a flow cytometry-based cytokine bead array (CBA), according to the manufacturer's protocol.

[1657] Various single expressing plasmids and combination plasmids encoding mouse IRF3 S388D, mouse IFNα2, mouse IFN-β were compared to the hSTING N154S/R284G tazCTT plasmid. As shown in the table below, transfections with constructs mIFNα2, mIFN-β, and mIFNα2 T2A mIFN-β had higher levels of IFN-α and IFN-β than hSTING N154S/R284G tazCTT. mIFN-β and mIFNα2 T2A mIFN-β constructs had higher levels of CXCL10 than hSTING N154S/R284G tazCTT. mIRF3 S388D, mIFNα2 T2A mIRF3 S388D, and mIRF3 S388D T2A mIFNα2 constructs all had lower IL-6 levels than hSTING N154S/R284G tazCTT. These data demonstrate the ability to induce type I IFN signaling through multiple combinations of expressed type I IFN components, alone and in combination, and with minimal induction of pro-inflammatory IL-6. Expression of IFN-β alone induces the highest type I IFN activity of all the targets tested.

Cytokines Resulting from Transfection of Mouse IRF3, IFNα2, and IFN-β in BMDCs

| | IFN-α | | IFN-β | | CXCL10 | | IL-6 | |
|---|---|---|---|---|---|---|---|---|
| | Mean | ±SD | Mean | ±SD | Mean | ±SD | Mean | ±SD |
| No DNA | 3.38 | 1.99 | 5.18 | 1.85 | 34.05 | 0.78 | 5.74 | 1.86 |
| huSTING tazCTT | 72.07 | 26.35 | 62.18 | 13.68 | 7199.95 | 1468.73 | 183.82 | 50.88 |
| N154S + R284G | | | | | | | | |
| mIFNα2 | 99.91 | 21.01 | 62.48 | 9.97 | 5524.30 | 303.77 | 174.86 | 39.07 |
| mIFN-β | 91.95 | 44.55 | 190.12 | 13.94 | 8178.50 | 1917.96 | 191.92 | 14.28 |
| mIRF3 S388D | 33.36 | 3.19 | 30.42 | 0.88 | 2428.30 | 414.51 | 90.29 | 12.83 |
| mIFNα2 T2A | 72.84 | 12.10 | 77.70 | 3.78 | 5226.50 | 795.07 | 202.70 | 17.23 |
| mIFN-β | | | | | | | | |
| muIFNα2 T2A | 20.82 | 6.37 | 21.49 | 3.13 | 2077.50 | 356.38 | 95.41 | 10.88 |
| muIRF3 S388D | | | | | | | | |
| muIRF3 S388D | 43.72 | 15.15 | 32.72 | 3.39 | 3187.75 | 9.12 | 134.63 | 0.66 |
| T2A muIFNα2 | | | | | | | | |

### C. Mouse IFNα2 T2A IFN-β is Expressed in vivo in a Murine Orthotopic Breast Cancer Model

[1658] For this experiment, 6-8 week-old female BALB/c mice (5 mice per group) were inoculated in the left mammary fat pad with EMT6 tumor cells (ATCC #CRL-2755) (1×10⁶ cells in 100 μL PBS). Mice bearing 9 day-old established mammary tumors (˜100 mm³ in volume) were IV injected with a single dose of 2×10⁷ CFUs of the YS1646Δasd/ΔFLG/ΔpagP/ΔansB/ΔcsgD/ΔpurI_{(large clean)} strain containing a bicistronic plasmid encoding mIFNα2 T2A mIFN-β, and compared to PBS control.

[1659] The level of tumor mIFNα2 and mIFN-β expression, relative to actin, was determined in order to assess tumor-specific payload delivery. On day 4 post-IV injection, tumors were excised and processed for RNA extraction using the TissueLyser II (Qiagen) in 1.2 mL of RLT plus lysis buffer. The homogenates were collected for RNA isolation using the RNeasy® Plus Mini Kit (Qiagen), according to the manufacturer's instructions. Total RNA concentration was measured using a NanoDrop™ 2000 UV-Vis Spectrophotometer (Thermo Scientific). The purity of each sample also was assessed from the A₂₆₀/A₂₃₀ absorption ratio. Synthesis of cDNA was performed from 0.5-1 μg of template RNA using a CFX96™ Real-Time System (Bio-Rad) and iScript™ gDNA Clear cDNA Synthesis Kit (Bio-Rad) in a 20 μL reaction, according to the manufacturer's instructions. qPCR was performed with a CFX96 Real-Time System (Bio-Rad). PrimePCR™ Probe Assay for mIFNα2 (qMmuCEP0043629), mIFNβ1 (qMmuCEP0058870) were purchased from Bio-Rad. The qPCR reaction (20 μL) was conducted per protocol, using either the SsoAdvanced Universal SYBR® Green Supermix or the iQ Multiplex Powermix (Bio-Rad). The standard thermocycling program on the Bio-Rad CFX96 Real-Time System consisted of a 95° C. denaturation for 150 sec, followed by 39 cycles of 95° C. for 15 sec and 60° C. for 55 sec. Quantification of the target mRNA was normalized using Actin reference mRNA (Bio-Rad, qMmuCEP0039589). ΔC_{q} was calculated as the difference between the target and reference gene.

[1660] The values are shown in the table below, as the average of five mice (PBS group) or three mice (mIFNα2+mIFN-β group). Compared to the PBS control group, YS1646Δasd/ΔFLG/ΔpagP/ΔansB/ΔcsgD/ΔpurI_{(large clean)} strain containing plasmids encoding mIFNα2 and mIFN-β significantly increased expression of mIFNα2 and mIFN-β genes in EMT6 tumors.

| | Ave Fold Expression | |
|---|---|---|
| | Relative to PBS Control | |
| Treatments | IFNα2 | IFNβ1 |
| YS1646Δasd/ΔFLG/ΔpagP/ΔansB/ΔcsgD/ | 5.37E+03 | 7.60E+00 |
| ΔpurI_{(large clean)} strain + mIFNα2 + mIFN-β | | |

[1661] In order to measure plasmid delivery to the tumor, and subsequent heterologous gene expression and protein secretion, the amount of mIFNα2 and mIFN-β protein was measured in these tumors. For this, lysates were harvested from homogenized tumors and assessed for protein expression using a flow cytometry-based cytokine bead array (CBA), according to the manufacturer's protocol.

[1662] As shown in the table below, the YS1646Δasd/ΔFLG/ΔpagP/ΔansB/ΔcsgD/ΔpurI_{(large clean)} strain containing plasmids encoding mIFNα2 and mIFN-β demonstrated high levels of mIFNα2 and mIFN-β protein per gram of tumor, as compared to the PBS control tumors, demonstrating potent delivery of mIFNα2 and mIFN-β into tumors following IV administration.

| | pg/ml per gram of tumor | |
|---|---|---|
| treatments | IFNα2 | IFN-β |
| PBS | 20497.6 ± 6249 | 75.8 ± 21 |
| YS1646Δasd/ΔFLG/ΔpagP/ΔansB/ΔcsgD/ | 37538.5 ± 3843 | 307.7 ± 49 |
| ΔpurI_{(large clean)} strain + mIFNα2 + mIFN-β | | |

[1663] Additional constructs encoding type I interferons (IFNs) are described in Example 57 below. Those constructs and plasmids containing them can be introduced into the immunostimulatory bacteria provided herein, such as the strain YS1646Δasd/ΔFLG/ΔpagP/ΔansB/ΔcsgD/ΔpurI_{(large clean)} and related strains such as those strains that lack flagella (ΔFLG) are csgD⁻. and msbB⁻/pagP⁻ described throughout the disclosure herein.

### Example 41

### Expression of Membrane Bound Human and Mouse IL-12 in Mouse and Human Cells

[1664] Mouse membrane bound IL-12p70 (SEQ ID NO:466) was constructed with mouse IL-12p40 (residues 3009-4010 of SEQ ID NO:399) followed by a 15 amino acid linker (SEQ ID NO:480; GGGGSGGGGSGGGGS), and IL-12p35 (residues 4056-4634 of SEQ ID NO:399). The transmembrane and cytosolic portions of murine CD80 (SEQ ID NO:481; PPEDPPDSKNTLVLFGAGFGAVITVVVIVVIIKCFCKHRSCFRRNEASRETNNS LTFGPEEALAEQTVFL) follow this sequence. Human membrane bound IL-12p70 (SEQ ID NO:467) was constructed with human IL-12p40 (SEQ ID NO: 482; MCHQQLVISWFSLVFLASPLVAIWELKKDVYVVELDWYPDAPGEMVVLTCD TPEEDGITWTLDQSSEVLGSGKTLTIQVKEFGDAGQYTCHKGGEVLSHSLLLL HKKEDGIWSTDILKDQKEPKNKTFLRCEAKNYSGRFTCWWLTTISTDLTFSV KSSRGSSDPQGVTCGAATLSAERVRGDNKEYEYSVECQEDSACPAAEESLPIE VMVDAVHKLKYENYTSSFFIRDIIKPDPPKNLQLKPLKNSRQVEVSWEYPDT WSTPHSYFSLTFCVQVQGKSKREKKDRVFTDKTSATVICRKNASISVRAQDR YYSSSWSEWASVPCS) followed by a 15 amino acid linker sequence (GGGGSGGGGSGGGGS, SEQ ID NO: 480) and human IL-12p35 (RNLPVATPDPGMFPCLHHSQNLLRAVSNMLQKARQTLEFYPCTSEEIDHEDI TKDKTSTVEACLPLELTKNESCLNSRETSFITNGSCLASRKTSFMMALCLSSIY EDLKMYQVEFKTMNAKLLMDPKRQIFLDQNMLAVIDELMQALNFNSETVPQ KSSLEEPDFYKTKIKLCILLHAFRIRAVTIDRVMSYLNAS, SEQ ID NO:483). The transmembrane and cytosolic portions of human CD80 (SEQ ID NO:484; DNLLPSWAITLISVNGIFVICCLTYCFAPRCRERRRNERLRRESVRPV) follow this sequence.

[1665] HEK cells were seeded in 24-well plates coated with poly-L-lysine at 200,000 cells per well, and incubated overnight at 37° C. in a 5% CO₂ incubator, to achieve 80% confluency. The following day, 300 ng of each plasmid DNA, and 40 ng of a CMV-GFP vector (i.e., a vector encoding green fluorescent protein under the control of a CMV promoter), were diluted in serum-free media and added to FuGENE® transfection reagent (Promega), at the proper reagent:DNA ratio, with untransfected wells serving as negative controls (in duplicates). Cell culture supernatants from each sample were collected 48 hours post-transfection.

[1666] The activity of the constructs were evaluated using a co-culture of transfected HEK cells with HEK-Blue IL-12 (InvivoGen) cells. 24 hours post transfection, 5e4 HEK cells were detached and seeded in a 96-well TC plate. Additionally, 5e4 HEK-Blue IL-12 cells were seeded in the same wells. 48 hours post transfection, cell culture supernatants from each sample were collected 48 hours post-transfection. Human and mouse IL-12 bioactivity was determined by measuring the SEAP reporter, which measures activation of the STAT-4 pathway downstream of IL-12 binding to its receptor. IL-12 bioactivity was determined by measuring ISRE-induced SEAP activity on a SpectraMax® M3 Spectrophotometer (Molecular Devices), at an absorbance wavelength of 650 nm.

[1667] The expression results of the constructs are provided in the table below. Each of the murine and human membrane bound IL-12p70 activated the STAT4-SEAP reporter in HEK-Blue IL-12 cells to at least the same extent as soluble murine and human IL-12p70, thereby confirming the functionality of constructs.

### Mouse and Human Membrane Bound IL-12p70 Expression Normalized by Transfection Efficiency

| | STAT4-SEAP | |
|---|---|---|
| | (Absorbance/% GFP) | |
| | Mean | ±SD |
| Untransfected | ND | ND |
| muIL-12p70 | 0.1104 | 0.0024 |
| huIL-12p70 | 0.1098 | 0.0031 |
| muIL-12p70.B7 | 0.1166 | 0.0005 |
| huIL-12p70.B7 | 0.2368 | 0.0057 |

[1669] Membrane bound IL-12p70 constructs were tested for expression on the surface of transfected HEK cells by flow cytometry. HEK wildtype cells transfected with murine or human IL-12p70, using the same conditions as above, and were harvested 48 hours post transfection. Cells were detached by PBS and seeded in wells of a V-bottom 96-well plate. The cells were washed once with PBS+2% FBS by centrifugation at 1300 RPM for 3 minutes. The cells were then resuspended in 50 uL PBS+2% FBS containing either anti-human IL-12p70 APC (Miltenyi) diluted 1:10 or anti-mouse IL-12p70 APC (Miltenyi) diluted 1:10, and incubated on ice for 30 minutes in the dark. The cells were washed twice with PBS+2% FBS by centrifugation at 1300 RPM for 3 minutes and resuspended in DAPI diluted 1:6000 in PBS+2% FBS. Flow cytometry data were acquired using the ACEA NovoCyte® flow cytometer (ACEA Biosciences, Inc.), and analyzed using the FlowJo™ software (Tree Star, Inc.). Only 1.67% of untransfected cells were APC positive, while the membrane bound human IL-12p70 was 40.4% positive and the membrane bound murine IL-12p70 was 59.9%. Therefore, these membrane bound IL-12 constructs are well expressed on human cells.

[1670] Plasmids containing human or murine membrane bound IL-12p70 were tested for expression by transfection in murine primary bone marrow-derived dendritic cells (BMDCs). Wild type murine bone marrow was isolated and flushed into 1.5 mL Eppendorf tubes, and spun at 1200 RPM for 5 minutes, to collect the bone marrow cells. Cells were washed once in RPMI-1640+10% FBS, then seeded in 96-well TC-treated plates in RPMI-1640+10% FBS with 20 ng/ml GM-CSF. On Day 3, additional RPMI-1640+10% FBS with 20 ng/ml GM-CSF was added to the cells. After six days, non-adherent cells were pipetted off the wells and re-seeded at 2e5 cells per well in RPMI-1640+10% FBS in a 96-well plate for transfection. Cells were transfected using Viromer® RED transfection reagent, according to the manufacturer's instructions. Briefly, 300 ng of plasmid DNA, as well as a “No DNA” (transfection reagent only) control, were diluted in the provided buffer, and mixed with 0.08 μL of Viromer® RED transfection reagent and incubated at room temperature for 15 minutes to allow the DNA/Viromer® RED complexes to form. The DNA/Viromer® RED complexes were then slowly added to each well of the 96-well plate (in duplicates), and the plate was incubated at 37° C. in a CO₂ incubator. Cells were harvested 48 hours post transfection and were assayed for IL-12 surface expression using flow cytometry.

[1671] The cells were washed once with PBS+2% FBS by centrifugation at 1300 RPM for 3 minutes. The cells were then resuspended in 50 μL PBS+2% FBS containing either anti-human IL-12p70 APC (Miltenyi) diluted 1:10 or anti-mouse IL-12p70 APC (Miltenyi) diluted 1:10, CD11b PE diluted 1:200, ClassII APC-Cy7 diluted 1:200, and incubated on ice for 30 minutes in the dark. The cells were washed twice with PBS+2% FBS by centrifugation at 1300 RPM for 3 minutes and resuspended in DAPI stain diluted 1:6000 in PBS+2% FBS. Flow cytometry data were acquired using the ACEA NovoCyte® flow cytometer (ACEA Biosciences, Inc.), and analyzed using the FlowJo™ software (Tree Star, Inc.). In the dendritic cell population, only 0.205%±0.021% of untransfected cells and 0.685% 0.262% of VCIP IRES CMV NanoLuc® transfected cells were APC positive while the membrane bound human IL-12p70 was 6.14% 1.27% positive and the membrane bound murine IL-12p70 was 2.64% 0.87% positive. These results show that the membrane bound IL-12 constructs were detected on the surface of mouse bone marrow dendritic cells above background.

[1672] Plasmids containing murine membrane bound IL-12p70 also were tested for expression by transfection in murine primary bone marrow-derived macrophages (BMMs). Wild type murine bone marrow was isolated and flushed into 1.5 mL Eppendorf tubes, and spun at 1200 RPM for 5 minutes, to collect the bone marrow cells. Cells were washed once in RPMI-1640+10% FBS, then seeded in 24-well TC-treated plates in RPMI-1640+10% FBS with 20 ng/ml M-CSF. After three days, media was aspirated and replenished with 20 ng/ml M-CSF. Cells were transfected using Viromer® RED transfection reagent, according to the manufacturer's instructions. Briefly, 750 ng of plasmid DNA, as well as a “No DNA” control, were diluted in the provided buffer, and mixed with Viromer® RED transfection reagent and incubated at room temperature for 15 minutes to allow the DNA/Viromer® RED complexes to form. The DNA/Viromer® RED complexes were then slowly added to each well of the 96-well plate (in duplicates), and the plate was incubated at 37° C. in a CO₂ incubator. Cells were harvested 48 hours post transfection and were detached for IL-12 surface expression using flow cytometry.

[1673] The cells were detached with 10 mM EDTA and washed once with PBS+2% FBS by centrifugation at 1300 RPM for 3 minutes. The cells were then resuspended in 50 uL PBS+2% FBS containing either anti-human IL-12p70 APC (Miltenyi) diluted 1:10 or anti-mouse IL-12p70 APC (Miltenyi) diluted 1:10, CD11b PE diluted 1:200, ClassII APC-Cy7 diluted 1:200, and incubated on ice for 30 minutes in the dark. The cells were washed twice with PBS+2% FBS by centrifugation at 1300 RPM for 3 minutes and resuspended in DAPI diluted 1:6000 in PBS+2% FBS. Flow cytometry data were acquired using the ACEA NovoCyte® flow cytometer (ACEA Biosciences, Inc.), and analyzed using the FlowJo™ software (Tree Star, Inc.). Only 0.01% f 0.003% of untransfected cells and 0.36%±0.028% of VCIP IRES CMV NanoLuc® transfected cells were APC positive while the membrane bound murine IL-12p70 was 1.945%±0.106%. Therefore, these membrane bound IL-12 constructs were detected on the surface of mouse bone marrow macrophages above background.

### Example 42

### Expression of DLL3×CD3 Bispecific T-cell Engagers from Human Cells

[1674] DLL3×CD3 bispecific T-cell engagers (sold under the trademark BiTE®), which targets delta-like ligand 3, which is selectively expressed in small-cell lung cancer, and CD3+ T cells, containing a FLAG tag, were designed using the amino acid sequences of anti-DLL3 antibodies SC16.15, SC16.34, and SC16.56, see e.g., International Patent Publication No. WO 2017/031458 A2. The anti-CD3 arm of this BiTE construct was designed from clone 145-2C11. These antibodies are fully murine sequences cloned into the pATI-1.76 vector under the control of a CMV promoter and with a 3′ HPRE. For human administration, the antibodies can be humanized as appropriate. The sequences were confirmed by Sanger sequencing. The sequence of the resulting constructs are as follows:

### SC16.56 DLL3HL×CD3HL (SEQ ID NO:485)

[1675] The construct includes, in the following order: mouse IgGK leader, SC16.56 VH, 15 amino acid GS linker, SC16.56 VL, 5 amino acid linker, 145-2C11 VH, 15 amino acid GS linker, 145-2C11 VL, and Flag tag, as set forth in SEQ ID NO: 485, and below:

| | |
|---|---|
| METDTLLLWVLLLWVPGSTGD (SEQ ID NO: 557) | mouse IgGK leader |
| QIQLVQSGPELKKPGETVKISCKASGYTFTNYGM | SC16.56 VH |
| NWVKQAPGKGLKWMAWINTYTGEPTYADDFKG | |
| RFAFSLETSASTASLQIINLKNEDTATYFCARIGDS | |
| SPSDYWGQGTTLTVSS (SEQ ID NO: 558) | |
| GGGGSGGGGSGGGGS (SEQ ID NO: 480) | 15 amino acid GS linker |
| SIVMTQTPKFLLVSAGDRVTITCKASQSVSNDVVW | SC16.56 VL |
| YQQKPGQSPKLLIYYASNRYTGVPDRFAGSGYGTD | |
| FSFTISTVQAEDLAVYFCQQDYTSPWTFGGGTKLEIR | |
| (SEQ ID NO: 559) | |
| GGGGS (SEQ ID NO: 560) | 5 amino acid GS linker |
| EVQLVESGGGLVQPGKSLKLSCEASGFTFSGYGM | 145-2C11 VH |
| HWVRQAPGRGLESVAYITSSSINIKYADAVKGRFT | |
| VSRDNAKNLLFLQMNILKSEDTAMYYCARFDWD | |
| KNYWGQGTMVTVSS (SEQ ID NO: 561) | |
| GGGGSGGGGSGGGGS (SEQ ID NO: 480) | 15 amino acid GS linker |
| DIQMTQSPSSLPASLGDRVTINCQASQDISNYLNW | 145-2C11 VL |
| YQQKPGKAPKLLIYYTNKLADGVPSRFSGSGSGRD | |
| SSFTISSLESEDIGSYYCQQYYNYPWTFGPGTKLEIK | |
| (SEQ ID NO: 562) | |
| DYKDDDDK (SEQ ID NO: 412) | Flag tag |

### SC16.56 DLL3LH×CD3HL (SEQ ID NO: 486)

[1676] The construct includes, in the following order: mouse IgGK leader, SC16.56 VL, 15 amino acid GS linker, SC 16.56 VH., 5 amino acid linker, 145-2C11 VH, 15 amino acid GS linker, 145-2C11 VL, and Flag tag, as set forth in SEQ ID NO: 486, and below:

| | |
|---|---|
| METDTLLLWVLLLWVPGSTGD (SEQ ID NO: 557) | mouse IgGK leader |
| SIVMTQTPKFLLVSAGDRVTITCKASQSVSNDVVW | SC16.56 VL |
| YQQKPGQSPKLLIYYASNRYTGVPDRFAGSGYGTD | |
| FSFTISTVQAEDLAVYFCQQDYTSPWTFGGGTKLEIR | |
| (SEQ ID NO: 559) | |
| GGGGSGGGGSGGGGS (SEQ ID NO: 480) | 15 amino acid GS linker |
| QIQLVQSGPELKKPGETVKISCKASGYTFTNYGM | SC16.56 VH |
| NWVKQAPGKGLKWMAWINTYTGEPTYADDFKG | |
| RFAFSLETSASTASLQIINLKNEDTATYFCARIGDS | |
| SPSDYWGQGTTLTVSS (SEQ ID NO: 558) | |
| GGGGS (SEQ ID NO: 560) | 5 amino acid linker |
| EVQLVESGGGLVQPGKSLKLSCEASGFTFSGYGM | 145-2C11 VH |
| HWVRQAPGRGLESVAYITSSSINIKYADAVKGRFT | |
| VSRDNAKNLLFLQMNILKSEDTAMYYCARFDWD | |
| KNYWGQGTMVTVSS (SEQ ID NO: 561) | |
| GGGGSGGGGSGGGGS (SEQ ID NO: 480) | 15 amino acid GS linker |
| DIQMTQSPSSLPASLGDRVTINCQASQDISNYLNW | 145-2C11 VL |
| YQQKPGKAPKLLIYYTNKLADGVPSRFSGSGSGRD | |
| SSFTISSLESEDIGSYYCQQYYNYPWTFGPGTKLEIK | |
| (SEQ ID NO: 562) | |
| DYKDDDDK (SEQ ID NO: 412) | Flag tag |

### SC16.15 DLL3HL×CD3HL (SEQ ID NO: 487)

[1677] The construct includes, in the following order: mouse IgGK leader, SC16.15 VH, 15 amino acid GS linker, SC 16.15 VL, 5 amino acid linker, 145-2C11 VH, 15 amino acid GS linker, 145-2C11 VL, and Flag tag, as set forth in SEQ ID NO: 487, and below:

| | |
|---|---|
| METDTLLLWVLLLWVPGSTGD (SEQ ID NO: 557) | mouse IgGK leader |
| QVQLQQSGAELAKPGASVKMSCKASGYTFTRYWIH | SC16.15 VH |
| WIKQRPGQGLEWIGYINPTTVYTEFNQNFKDKATLT | |
| ADKSSTTASMQLSSLTSEDSAVYYCARGGSNFFDYW | |
| GQGTTLTVSS (SEQ ID NO: 563) | |
| GGGGSGGGGSGGGGS (SEQ ID NO: 480) | 15 amino acid GS linker |
| DIQMTQSPASLAASVGETVAITCRASENIYYNLAWY | SC16.15 VL |
| QQKQGKSPQLLIYTANSLEDGVPSRFSGSGSGTQYSL | |
| KINSMQPEDSATYFCKQAYDVPPTFGGGTKLEIK | |
| (SEQ ID NO: 564) | |
| GGGGS (SEQ ID NO: 560) | 5 amino acid linker |
| EVQLVESGGGLVQPGKSLKLSCEASGFTFSGYGM | 145-2C11 VH |
| HWVRQAPGRGLESVAYITSSSINIKYADAVKGRFT | |
| VSRDNAKNLLFLQMNILKSEDTAMYYCARFDWD | |
| KNYWGQGTMVTVSS (SEQ ID NO: 561) | |
| GGGGSGGGGSGGGGS (SEQ ID NO: 480) | 15 amino acid GS linker |
| DIQMTQSPSSLPASLGDRVTINCQASQDISNYLNW | 145-2C11 VL |
| YQQKPGKAPKLLIYYTNKLADGVPSRFSGSGSGRD | |
| SSFTISSLESEDIGSYYCQQYYNYPWTFGPGTKLEIK | |
| (SEQ ID NO: 562) | |
| DYKDDDDK (SEQ ID NO: 412) | Flag tag |

### SC16.15 DLL3LH×CD3HL (SEQ ID NO:488)

[1678] The construct includes, in the following order: mouse IgGK leader, SC16.15 VL, 15 amino acid GS linker, SC 16.15 VH, 5 amino acid linker, 145-2C11 VH, 15 amino acid GS linker, 145-2C11 VL, and Flag tag, as set forth in SEQ ID NO: 488, and below:

| | |
|---|---|
| METDTLLLWVLLLWVPGSTGD (SEQ ID NO: 557) | mouse IgGK leader |
| DIQMTQSPASLAASVGETVAITCRASENIYYNLAWY | SC16.15 VL |
| QQKQGKSPQLLIYTANSLEDGVPSRFSGSGSGTQYSL | |
| KINSMQPEDSATYFCKQAYDVPPTFGGGTKLEIK | |
| (SEQ ID NO: 564) | |
| GGGGSGGGGSGGGGS (SEQ ID NO: 480) | 15 amino acid GS linker |
| QVQLQQSGAELAKPGASVKMSCKASGYTFTRYWIH | SC16.15 VH |
| WIKQRPGQGLEWIGYINPTTVYTEFNQNFKDKATLT | |
| ADKSSTTASMQLSSLTSEDSAVYYCARGGSNFFDYW | |
| GQGTTLTVSS (SEQ ID NO: 563) | |
| GGGGS (SEQ ID NO: 560) | 5 amino acid linker |
| EVQLVESGGGLVQPGKSLKLSCEASGFTFSGYGM | magenta highlight is |
| HWVRQAPGRGLESVAYITSSSINIKYADAVKGRFT | 145-2C11 VH |
| VSRDNAKNLLFLQMNILKSEDTAMYYCARFDWD | |
| KNYWGQGTMVTVSS (SEQ ID NO: 561) | |
| GGGGSGGGGSGGGGS (SEQ ID NO: 480) | 15 amino acid GS |
| | linker |
| DIQMTQSPSSLPASLGDRVTINCQASQDISNYLNW | 145-2C11 VL |
| YQQKPGKAPKLLIYYTNKLADGVPSRFSGSGSGRD | |
| SSFTISSLESEDIGSYYCQQYYNYPWTFGPGTKLEIK | |
| (SEQ ID NO: 562) | |
| DYKDDDDK (SEQ ID NO: 412) | Flag tag |

### SC16.34 DLL3HL×CD3HL (SEQ ID NO:489)

[1679] The construct includes, in the following order: mouse IgGK leader, SC16.34 VH, 15 amino acid GS linker, SC 16.34 VL, 5 amino acid linker, 145-2C11 VH, 15 amino acid GS linker, 145-2C11 VL, and Flag tag, as set forth in SEQ ID NO: 489, and below:

| | |
|---|---|
| METDTLLLWVLLLWVPGSTGD (SEQ ID NO: 557) | mouse IgGK leader |
| QIQLVQSGPELKRPGETVKISCKASGYTFTNYGMN | SC16.34 VH |
| WVKQAPGKGLKWMGWINTYTGDPTYADDFKGRF | |
| AFSLETSASTAYLQINNLKNEDTATYFCARIGGNSPS | |
| DYWGQGTSLTVSS (SEQ ID NO: 565) | |
| GGGGSGGGGSGGGGS (SEQ ID NO: 480) | 15 amino acid GS linker |
| SIVMTQTPKFLLVSAGDRVTITCKASQSVSNDVAW | SC16.34 VL |
| YQQKPGQSPKLLIYYASNRYSGVPDRFTGSGYGTDF | |
| TFTISTVQAEDLAVYFCQQDYSSPWTFGGGTKLEIK | |
| (SEQ ID NO: 566) | |
| GGGGS (SEQ ID NO: 560) | 5 amino acid linker |
| EVQLVESGGGLVQPGKSLKLSCEASGFTFSGYGM | 145-2C11 VH |
| HWVRQAPGRGLESVAYITSSSINIKYADAVKGRFT | |
| VSRDNAKNLLFLQMNILKSEDTAMYYCARFDWD | |
| KNYWGQGTMVTVSS (SEQ ID NO: 561) | |
| GGGGSGGGGSGGGGS (SEQ ID NO: 480) | 15 amino acid GS linker |
| DIQMTQSPSSLPASLGDRVTINCQASQDISNYLNW | 145-2C11 VL |
| YQQKPGKAPKLLIYYTNKLADGVPSRFSGSGSGRD | |
| SSFTISSLESEDIGSYYCQQYYNYPWTFGPGTKLEIK | |
| (SEQ ID NO: 562) | |
| DYKDDDDK (SEQ ID NO: 412) | |

### SC16.34 DLL3LH×CD3HL (SEQ ID NO: 490)

[1680] The construct includes, in the following order: mouse IgGK leader, SC16.34 VL, 15 amino acid GS linker, SC 16.34 VH, 5 amino acid linker, 145-2C11 VH, 15 amino acid GS linker, 145-2C11 VL, and Flag tag, as set forth in SEQ ID NO: 490, and below:

| | |
|---|---|
| METDTLLLWVLLLWVPGSTGD (SEQ ID NO: 557) | mouse IgGK leader |
| SIVMTQTPKFLLVSAGDRVTITCKASQSVSNDVAW | SC16.34 VL |
| YQQKPGQSPKLLIYYASNRYSGVPDRFTGSGYGTDF | |
| TFTISTVQAEDLAVYFCQQDYSSPWTFGGGTKLEIK | |
| (SEQ ID NO: 566) | |
| GGGGSGGGGSGGGGS (SEQ ID NO: 480) | 15 amino acid GS linker |
| QIQLVQSGPELKRPGETVKISCKASGYTFTNYGMN | SC16.34 VH |
| WVKQAPGKGLKWMGWINTYTGDPTYADDFKGRF | |
| AFSLETSASTAYLQINNLKNEDTATYFCARIGGNSPS | |
| DYWGQGTSLTVSS (SEQ ID NO: 565) | |
| GGGGS (SEQ ID NO: 560) | 5 amino acid linker, |
| EVQLVESGGGLVQPGKSLKLSCEASGFTFSGYGM | 145-2C11 VH |
| HWVRQAPGRGLESVAYITSSSINIKYADAVKGRFT | |
| VSRDNAKNLLFLQMNILKSEDTAMYYCARFDWD | |
| KNYWGQGTMVTVSS (SEQ ID NO: 561) | |
| GGGGSGGGGSGGGGS (SEQ ID NO: 480) | 15 amino acid GS linker |
| DIQMTQSPSSLPASLGDRVTINCQASQDISNYLNW | 145-2C11 VL |
| YQQKPGKAPKLLIYYTNKLADGVPSRFSGSGSGRD | |
| SSFTISSLESEDIGSYYCQQYYNYPWTFGPGTKLEIK | |
| (SEQ ID NO: 562) | |
| DYKDDDDK (SEQ ID NO: 412) | Flag tag |

[1681] 1.5×10⁶ HEK293T cells were plated one day prior on 6-well plates coated with poly-L-lysine, to achieve 80% confluency. On the day of transfection, 3 μg of DNA was diluted in serum-free media and added to FuGENE® transfection reagent (Promega), at the proper reagent:DNA ratios. Cell culture supernatants from each sample were collected after 48 hours of incubation. Some supernatant was concentrated in a 10 kDa spin column (Millipore).

[1682] The functionality of these cells transfected with the DLL3×CD3 BiTE encoding plasmids was demonstrated by binding of the DLL3×CD3 bispecific T-cell engagers on the cells to SHP77 cells (ATCC), which have DLL3 on the surface. 500,000 SHP77 cells were seeded in wells of a V-bottom 96-well plate. The cells were washed once with PBS+2% FBS by centrifugation at 1300 RPM for 3 minutes. The cells were resuspended in 50 uL PBS+2% FBS containing concentrated HEK supernatant corresponding to either untransfected cells or cells transfected with a BiTE. After 30 minutes, the cells were washed twice with PBS+2% FBS by centrifugation at 1300 RPM for 3 minutes. The cells were then resuspended in 50 uL PBS+2% FBS containing either anti-Flag biotin (Sigma) at 1:100 dilution or Protein L biotin (Genscript) at 1:200 dilution, and incubated on ice for 30 minutes. The cells were washed twice with PBS+2% FBS by centrifugation at 1300 RPM for 3 minutes. Subsequently, the cells were stained with Streptavidin APC (Biolegend) at 1:200 dilution and incubated on ice for 30 minutes in the dark.

[1683] The cells were washed twice with PBS+2% FBS by centrifugation at 1300 RPM for 3 minutes and resuspended in DAPI diluted 1:6000 in PBS+2% FBS. Flow cytometry data were acquired using the ACEA NovoCyte® flow cytometer (ACEA Biosciences, Inc.), and analyzed using the FlowJo™ software (Tree Star, Inc.).

[1684] The table below provides the percent of positive cells gated as APC positive, corresponding to cells stained with BiTE and detected either by Protein L or anti-Flag antibody. SC16.56 DLL3LH×CD3HL, SC16.34 DLL3HL×CD3HL, and SC16.34 DLL3LH×CD3HL BiTEs all have similar detection on SHP77 cells while the other BiTEs are not detected. Therefore, SC16.56 DLL3LH×CD3HL, SC16.34 DLL3HL×CD3HL, and SC16.34 DLL3LH×CD3HL bind to DLL3.

### Binding of Cells Expressing the DLL3×DC3 Bispecific T-Cell Engagers DLL SHP77 Cells

| | | % Binding to SHP77 | % Binding to SHP77 |
|---|---|---|---|
| | | Detected by Protein L | Detected by anti-Flag |
| Untransfected | Mean (%) | ND | ND |
| SC16.56 DLL3HLxCD3HL BiTE | Mean (%) | ND | ND |
| SC16.56 DLL3LHxCD3HL BiTE | Mean (%) | 36.4 | 20.9 |
| SC16.15 DLL3HLxCD3HL BiTE | Mean (%) | ND | ND |
| SC16.15 DLL3LHxCD3HL BiTE | Mean (%) | ND | ND |
| SC16.34 DLL3HLxCD3HL BiTE | Mean (%) | 36.6 | 19.6 |
| SC16.34 DLL3LHxCD3HL BiTE | Mean (%) | 36.4 | 20.1 |

[1686] The expressed DLL3×CD3 bispecific T-cell engagers also were evaluated for binding to DLL3 and to CD3 with an ELISA. This ELISA was developed to detect correctly folded DLL3×CD3 bispecific T-cell engager binding to DLL3 and CD3 in the same assay. Human DLL3 (R&D Systems) was coated overnight at 4° C. on a high protein-binding 96-well plate, at a concentration of 1 ug/ml. The wells then were washed three times with PBS 0.05% Tween-20, and the wells were blocked with ELISA blocking buffer for 1 hour at room temperature. The wells then were washed three times with PBS 0.05% Tween-20. HEK293T cell culture supernatants, containing the DLL3×CD3 bispecific T-cell engagers, were added to the wells and incubated for 2 hours at room temperature. The wells were washed three times with PBS 0.05% Tween-20, and human IgG Fc conjugated CD3e was added to the wells (Acro Biosystems), and incubated for one hour at room temperature. The wells again were washed three times with PBS 0.05% Tween-20, and horseradish peroxidase (HRP)-conjugated anti-human antibody was added for a 1 hour incubation. The wells were then washed three times with PBS 0.05% Tween-20, and detection reagent (3,3′,5,5′-tetramethylbenzidine (TMB), Thermo Fisher Scientific) was added to the wells. The enzymatic reaction was stopped with sulfuric acid (BioLegend), and the optical densities were read at 450 nm.

[1687] The table below provides the results of this ELISA, shown as the absorbance at 450 nm. All of the SC16.56 DLL3LH×CD3HL, SC16.34 DLL3HL×CD3HL, and SC16.34 DLL3LH×CD3HL BiTE antibodies were detected, showing that these BiTEs antibodies are fully functional. SC16.34 DLL3LH×CD3HL has the highest binding in this ELISA, but since cell supernatants were used in this assay, it is not possible to distinguish whether this results from a higher concentration of this bispecific T-cell engager, or higher affinity to its targets compared to the other 3 bispecific T-cell engagers. In a separate experiment, the bispecific T-cell engagers were purified using ANTI-FLAG M2 Affinity Gel (Sigma) and run on this ELISA. SC16.34 DLL3LH×CD3HL was the only purified BiTE to show ELISA signal above background.

### BiTE Binding by ELISA

| | Absorbance at 450 nm | |
|---|---|---|
| | Mean | ±SD |
| Untransfected | 0.010 | 0.001 |
| SC16.56 DLL3HLxCD3HL BiTE | 0.007 | 0.002 |
| SC16.56 DLL3LHxCD3HL BiTE | 0.175 | 0.051 |
| SC16.15 DLL3HLxCD3HL BiTE | 0.002 | 0.001 |
| SC16.15 DLL3LHxCD3HL BiTE | 0.001 | 0.002 |
| SC16.34 DLL3HLxCD3HL BiTE | 0.253 | 0.026 |
| SC16.34 DLL3LHxCD3HL BiTE | 1.458 | 0.089 |

### Example 43

### Anti-CTLA-4 scFv-Fc Demonstrates Blockade of the CD80/CTLA-4 and CD86/CTLA-4 Interactions and Co-Expresses with Human STING N154S/R284G tazCTT

[1689] An scFv-Fc specific for human CTLA-4 (see, SEQ ID NOs:427 and 428 for the nucleic acid and protein sequences, respectively) was designed using the amino acid sequence of ipilimumab. Ipilimumab is a fully human IgG1κ monoclonal antibody that specifically binds human CTLA-4 (see, e.g., the antibody designated 10D1 in U.S. Patent Publication No. 2002/0086014 and in U.S. Pat. No. 6,984,720), blocking CTLA-4's immune inhibiting interaction with CD80 (also known as B7.1 or B7-1) and CD86 (also known as B7.2 or B7-2).

[1690] To generate the ipilimumab scFv antibody fragment (see, SEQ ID NO:429), the variable light chain (V_{L}) and variable heavy chain (V_{H}) of ipilimumab were linked with a 20 amino acid long glycine-serine (GS) linker ((GGGGS)₄). To generate the scFv-Fc antibody fragment (see, SEQ ID NO:428), the variable heavy chain of the ipilimumab scFv was linked to a human IgG1 Fc, containing a mutation of the free cysteine in the hinge region to a serine (at position 272 in SEQ ID NO:428). The leader sequence (METPAQLLFLLLLWLPDTTG; corresponding to residues 1-20 in SEQ ID NO:428) was derived from the sequence of the human immunoglobulin kappa variable 3-20 (IGKV3-20) protein. The sequence was codon optimized for human using the GenScript GenSmart™ Codon Optimization tool (ATGGAGACACCTGCCCAGCTGCTGTTCCTGCTGCTGCTGTGGCTGCCCGA CACCACCGGC); the sequence is set forth in SEQ ID NO:491.

[1691] The neutralizing ability of the anti-CTLA-4 scFv-Fc was determined using competitive ELISAs to measure the ability of the antibody fragment to block the interactions between CTLA-4 and its ligands, CD80 and CD86. HEK293T cells were transfected with 3 micrograms of DNA encoding the anti-CTLA-4 scFv-Fc antibody fragment construct, using the FuGENE® transfection reagent (Promega), at the proper reagent:DNA ratios. Forty-eight hours post-transfection, HEK293T cell-free culture supernatants were harvested, filtered, and used in a competitive ELISA to assess the blockade activity of the anti-CTLA-4 antibody fragment.

[1692] For the competitive ELISAs, human CD80 or CD86 recombinant proteins (R&D Systems) were coated overnight at 4° C. on a high protein-binding 96-well plate, at a concentration of 100 ng/ml. The wells were then washed three times with PBS 0.05% Tween-20, and the wells were blocked with ELISA blocking buffer for 1 hour at room temperature. The wells were then washed three times with PBS 0.05% Tween-20. HEK293T cell culture supernatants, containing each of the anti-CTLA-4 antibody fragments, were mixed with 10 ng/ml of a recombinant human CTLA-4-human IgG1 Fc chimera (R&D Systems), and added to the wells and incubated for 2 hours at room temperature. The wells were then washed three times with PBS 0.05% Tween-20, and horseradish peroxidase (HRP)-conjugated anti-human IgG1 antibody was added to the wells (Jackson ImmunoResearch), and incubated for one hour at room temperature. The wells were then washed three times with PBS 0.05% Tween-20, and detection reagent (3,3′,5,5′-tetramethylbenzidine (TMB), Thermo Fisher Scientific) was added to the wells. The enzymatic reaction was stopped with sulfuric acid (BioLegend), and the optical densities were read at 450 nm.

[1693] The results of the competitive ELISAs are summarized in the table below. The anti-CTLA-4 scFv-Fc blocked the binding of CTLA-4 to CD86 by 94.14% and blocked the binding of CTLA-4 to CD80 by 83.46%. The CTLA4 scFv-Fc had a higher degree of CD86/CTLA-4 blocking activity compared with CD80/CTLA-4 blocking activity.

### Competitive ELISA Results

| | | % CD86 Blockade | % CD80 Blockade |
|---|---|---|---|
| | | Activity | Activity |
| Human Anti-CTLA-4 | Mean (%) | 94.14 | 83.46 |
| scFv-Fc | ±SD | 0.25 | 0.32 |

[1695] Human anti-CTLA4 scFv-Fc (SEQ ID NO:427) was cloned into expression vectors with huSTING N154S/R284G tazCTT either containing or not containing the Vascular Endothelial Growth Factor and Type 1 Collagen Inducible Protein (VCIP) IRES. HEK293T STING Null Cells (293-Dual™ Null Cells; InvivoGen) were used, which do not contain endogenous STING, and express secreted embryonic alkaline phosphatase (SEAP), placed under the control of the endogenous IFN-stimulated response element (ISRE) promoter, where the coding sequence of ISRE is replaced by the SEAP ORF using knock-in technology. STING activity, thus, is assessed by monitoring type I IFN induced SEAP production. The 293-Dual™ Null cells also express Lucia™ luciferase, a secreted luciferase, placed under the control of the endogenous IFN-β promoter; the coding sequence of IFN-β has been replaced by the Lucia™ luciferase ORF using knock-in technology. This allows for the assessment of STING activity by monitoring the expression of IFN-β. Using these cells, STING activity can be assessed by monitoring ISRE-induced SEAP production and/or IFN-β-dependent expression of Lucia™ luciferase. The two reporter proteins, SEAP and Lucia™ Luciferase, can be measured in the cell supernatant using standard assays and detection reagents, such as the QUANTI-Blue™ and QUANTI-Luc™ detection reagents (InvivoGen), respectively.

[1696] The cells were seeded in 24-well plates coated with poly-L-lysine at 200,000 cells per well, and incubated overnight at 37° C. in a 5% CO₂ incubator, to achieve 80% confluency. The following day, 300 ng of each plasmid DNA, and 40 ng of a CMV-GFP vector (i.e., a vector encoding green fluorescent protein under the control of a CMV promoter), were diluted in serum-free media and added to FuGENE® transfection reagent (Promega), at the proper reagent:DNA ratios, with untransfected wells serving as negative controls (in duplicates). Cell culture supernatants from each sample were collected 48 hours post-transfection.

[1697] The STING activity of the huSTING N154S/R284G tazCTT variant was evaluated using the ISRE-SEAP and IFN-β-Lucia™ reporter systems. The type I interferon (IFN) activity (induced by STING) was assessed by monitoring type I IFN-stimulated SEAP production in the cell supernatants. 20 μL of cell culture supernatant was added to 180 μL of QUANTI-Blue™ reagent (InvivoGen), which is used for measuring SEAP. Type I interferon activation was determined by measuring ISRE-induced SEAP activity on a SpectraMax® M3 Spectrophotometer (Molecular Devices), at an absorbance wavelength of 650 nm. The type I interferon (IFN) activity (induced by STING) also was assessed by monitoring the type I IFN-stimulated Lucia™ luciferase production in the cell supernatants. 20 μL of cell culture supernatant was added to 50 μL of QUANTI-Luc™ reagent (InvivoGen), which is used for measuring Lucia™ luciferase activity. Type I interferon activation was determined by measuring IFNβ-induced Lucia™ luciferase activity on a SpectraMax® M3 Spectrophotometer (Molecular Devices), on the luminescence setting.

[1698] Cell culture supernatants also were assessed for the expression of human CTLA4 scFv-Fc. Human CTLA4 (R&D Systems) was coated overnight at 4° C. on a high protein-binding 96-well plate, at a concentration of 1 ug/ml. The wells were then washed three times with PBS 0.05% Tween-20, and the wells were blocked with ELISA blocking buffer for 1 hour at room temperature. The wells were then washed three times with PBS 0.05% Tween-20. HEK293T cell culture supernatants, containing anti-CTLA4 scFv-Fc were added to the wells and incubated for 2 hours at room temperature. The wells were washed three times with PBS 0.05% Tween-20, and horseradish peroxidase (HRP)-conjugated anti-human antibody was added for a 1 hour incubation. The wells were then washed three times with PBS 0.05% Tween-20, and detection reagent (3,3′,5,5′-tetramethylbenzidine (TMB), Thermo Fisher Scientific) was added to the wells. The enzymatic reaction was stopped with sulfuric acid (BioLegend), and the optical densities were read at 450 nm.

[1699] The expression results of the human anti-CTLA4 scFv-Fc+hSTING N154S/R284G tazCTT constructs are shown below. Constructs containing both payloads retained expression of each protein. The human anti-CTLA4 scFv-Fc T2A hSTING N154S/R284G tazCTT construct had better STING activity without the VCIP IRES. Expression of anti-CTLA4 scFv-Fc was higher by ELISA from the construct without VCIP IRES, demonstrating that individual targets can require unique elements for improved expression.

Human anti-CTLA4 scFv-Fc+STING Expression Normalized by Transfection Efficiency

| | ISRE-SEAP | | IFNβ-Lucia | | Hu anti-CTLA4 | |
|---|---|---|---|---|---|---|
| | (Absorbance/ | | (Luminescence/ | | scFv-Fc | |
| | % GFP) | | % GFP) | | (Absorbance/% GFP) | |
| | Mean (%) | ±SD | Mean (%) | ±SD | Mean (%) | ±SD |
| Untransfected | ND | ND | ND | ND | ND | ND |
| hu anti-CTLA4 scFv-Fc | 0.00006 | 0.00003 | 0.13 | 0.029 | 0.129 | 0.006 |
| VCIP hu anti-CTLA4 | 0.0001 | 0.00008 | ND | ND | 0.080 | 0.009 |
| scFv-Fc | | | | | | |
| huSTING N154S/R284G | 0.095 | 0.005 | 17.567 | 2.859 | ND | ND |
| tazCTT | | | | | | |
| hu anti-CTLA4 scFv-Fc T2A | 0.063 | 0.004 | 6.698 | 0.222 | 0.028 | 0.001 |
| hSTING N154S/R284G | | | | | | |
| tazCTT | | | | | | |
| VCIP hu anti-CTLA4 | 0.050 | 0.005 | 5.213 | 0.191 | 0.017 | 0.00003 |
| scFv-Fc T2A hSTING | | | | | | |
| N154S/R284G tazCTT | | | | | | |

### Example 44

### Bacterial Strain Infection of Macrophages Allows the Presentation of Immunogenic Peptide by MHC-I Molecules

[1700] This Example shows that the bacteria provided herein bacteriofect antigen presenting cells with either mRNA delivery or plasmid DNA delivery, and the resulting expressed product is presented by antigen presenting cells. The anti-SIINFEKL/H-2Kb antibody, used for this demonstration, binds specifically to the ovalbumin SIINFEKL [SEQ ID NO:492] peptide only when presented by MHC-I (H-2Kb) at the surface of IC21 cells. This demonstrates that the vaccines strains provided herein, such as those that encode STING+IL-15 receptor complex+cancer antigen, can treat immune desert tumors, also can could be used as a cancer vaccine in the neoadjuvant setting, also can be used as a platform to present pathogenic antigens for prophylactic vaccination, and can be used as a treatment for pathogen infection, such as, for example, MRSA, chronic viral hepatitis infection, chronic p. gingivalis, HIV, and other chronic infections, as well as acute infection.

[1701] In demonstrating the above, the experiment in this Example, shows how the infection of antigen-presenting cells by the exemplary strain, designated YS1646Δasd/ΔFLG/ΔpagP/ΔansB/ΔcsgD, leads to presentation of immunogenic peptides by the major histocompatibility complex class-I (MHC-I) to CD8+ T cells. YS1646Δasd/ΔFLG/ΔpagP/ΔansB/ΔcsgD strains encoding the chicken ovalbumin under the eukaryotic CMV promoter and the prokaryotic MTL promoter followed or not with the encephalomyocarditis virus (EMCV) internal ribosome entry site (IRES) were generated. The chicken ovalbumin is a model antigen, and the immune-dominant SIINFEKL peptide derived from the chicken ovalbumin was monitored for its presentation by the murine H-2Kb MHC-I molecules at the surface of antigen-presenting cells. The murine peritoneal macrophages cell line IC21 (ATCC) was used as antigen-presenting cell in the assay.

[1702] Fifty thousand IC21 cells per well of a 96-well flat-bottom plate were seeded in 100 ul RPMI 10% FBS and left in a 37° C. and 5% CO₂ incubator over-night. The next day, IC21 cells were infected with YS1646Δasd/ΔFLG/ΔpagP/ΔansB/ΔcsgD strains containing plasmids encoding the chicken ovalbumin under the regulation of the CMV or MTL promoters. The bacterial strains were added to the cultured cells and the plate was centrifugated at 500 g for 5 minutes at room temperature. Cells were then incubated for 1h at 37° C. and culture media containing gentamycin was added for a final concentration of 50 ug/ml. Infected cells were left in at 37° C. and 5% CO₂ incubator for seven hours. Seven hours after the infection, IC21 cells were detached using PBS 10 mM EDTA and stained with anti-murine F4/80 APC-conjugated antibodies and anti-SIINFEKL/H-2Kb PE-conjugated antibodies (both from Biolegend), and the data was acquired using the ACEA Novocyte flow-cytometer.

[1703] The anti-SIINFEKL/H-2Kb antibody binds specifically to the ovalbumin SIINFEKL peptide only when presented by MHC-I (H-2Kb) at the surface of IC21 cells. The mean fluorescence intensity for the H-2Kb/SIINFEKL presentation by IC21 cells seven hours post-infection was measured. The results are presented in the table below, which shows the net mean fluorescence intensity (Net MFI) observed in the groups treated with the ovalbumin encoding strains over the uninfected cells.

| | Net Mean Fluorescence Intensity | |
|---|---|---|
| Treatment | over uninfected (Net MFI) | SEM* |
| Uninfected | 0 | NA |
| CMV-Ovalbumin | 606 | 54 |
| MTL-IRES-Ovalbumin | 632 | 3.5 |
| MTL-Ovalbumin | 384.5 | 42 |

*SEM = standard error of the mean

[1704] This Example shows the ability of strains, such as YS1646Δasd/ΔFLG/ΔpagP/ΔansB/ΔcsgD, to deliver antigens that are processed by the antigen-presenting cells and presented to CD8+ T cells upon delivery, to mount a T cell specific response against antigens relevant to or from pathogens or cancer cells.

### Example 45

### Infection of Immunostimulatory Bacteria Transformed with Plasmids Encoding huIL-15Rα-IL-15sc and huSTING N154S/R284G tazCTT Converts Human M2 Macrophages, and Not M1 Macrophages, into a Hybrid M1/M2-Like Phenotype That Retains M2 Phagocytic Functions

[1705] A long-held paradigm of macrophage phenotypes in tissues describes two distinct phenotypes: M1 and M2. An M1 macrophage phenotype is activated by sensing of foreign pathogens and/or damaged tumor cells to produce pro-inflammatory cytokines, such as IFNγ, TNFα, IL-6, IL-1p, IL-12 and IL-23, and chemokines such as CXCL10 and CXCL11, that allegedly recruit and activate adaptive immune cells to promote adaptive immunity. Direct killing by M1 macrophages can occur through production of IFNγ and cellular damage through production of reactive-oxygen species (ROS; Anfray et al., (2019) Cells 9:46). Chronic inflammation is understood to promote immunosuppressive M2 macrophage differentiation to resolve the tissue damage and promote wound healing. M2 macrophages produce immunosuppressive cytokines such as IL-10 and TGFβ, and tissue remodeling factors such as vascular endothelial growth factor (VEGF) and matrix metalloproteases (MMPs), in order to promote angiogenesis and tissue repair. Because of these immunosuppressive functions of M2, including purported upregulation of the immune checkpoints PD-1 and PD-L1 that impair T-cell function, they are primarily responsible for suppressing adaptive immunity in the tumor microenvironment (see, e.g., Anfray et al., (2019) Cells 9:46). According to this paradigm, it is M1 macrophages that induce tumor cell apoptosis via FasL, and phagocytosis of tumor cells (efferocytosis) and pathogens, as well as antigen presentation to T-cells. As such, many immunotherapies focus on repolarizing tumor M2 macrophages to M1 macrophages.

[1706] There are problems with this paradigm. First, if M1 cells are phagocytic and not M2, it is unclear how M2 macrophages resolve tissue damage if they cannot phagocytose dying cells. Similarly, there is a question regarding how M1 macrophages promote T-cell activation when they do not produce type I IFN, and instead produce pro-inflammatory cytokines that recruit and activate innate cells such as neutrophils and myeloid-derived suppressor cells that are unable to present antigens to T-cells. These discrepancies are highlighted by hospitalized SARS-CoV-2 patients, where lung immunophenotyping and serum cytokine analyses of patients with advanced lung disease have concluded that the production of pro-inflammatory cytokines from infiltrating M1 macrophages result in lung tissue destruction, impaired type I IFN production and CD8⁺ T-cell priming, and suppression of viral clearance, leading to disease progression and lethal lung damage (Gracia-Hernandez et al., (2020) Front Pharmacol 11:577571).

[1707] To further elucidate the role of M1 and M2 macrophages in anti-tumor immunity, and the effects on macrophage polarization from infection with immunostimulatory bacteria provided herein, such the immunostimulatory bacteria that carry a plasmid encoding huIL-15Rα-IL-15sc and huSTING N154S/R284G tazCTT, experiments were conducted in which primary human monocyte-derived macrophages, differentiated into M1 and M2 macrophages, were assessed post-infection for M1 and M2 markers; results are summarized in the table below.

TABLE
Markers Attributed to M1 and M2 Macrophage Phenotypes

| | | | M1 or |
|---|---|---|---|
| Class | Target | Function | M2 |
| Co-stimulatory | CD80 | Co-stimulatory Signal | M1 |
| molecules | CD86 | Co-stimulatory Signal | M1 |
| Chemokine | CCR7 | Lymphocyte node (LN) homing of T-cells and DCs | M1 |
| signaling | CXCL10 | Recruit T-cells | M1 |
| | CXCL11 | Recruit T-cells | M1 |
| Pattern | CD14 | Microbial-targeting (LPS) | M1/M2 |
| recognition | CD206 | Microbial-targeting (mannose) | M2 |
| receptors | CD209 | Enhanced phagocytosis, microbial-targeting (high man- | M2 |
| | | nose), viral pathogen clearance, cell trafficking, immune | |
| | | synapse formation, T-cell proliferation | |
| Scavenger | CD68 | Tumor-associated macrophages (TAMs) | M1/M2 |
| receptors | CD163 | Microbial targeting (gram-negative) | M2 |

[1708] A study, described above, and in co-owned International PCT publication No. WO2021/097144), infection with the immunostimulatory bacterium designated YS1646Δasd/ΔFLG/ΔpagP/ΔansB/ΔcsgD strain and containing a plasmid encoding one or more immunostimulatory proteins, converts an M2 phenotype macrophage into an M1 or M1-like macrophage, capable of upregulating co-stimulatory molecules, the CCR7 marker of lymph node migration, T-cell recruiting chemokines CXCL10 and CXCL11, as well as production of type I IFN. Since the prior study characterized polarization from an M2 macrophage to an M1 phenotype, a further study was performed to observe the effect of the YS1646Δasd/ΔFLG/ΔpagP/ΔansB/ΔcsgD strain containing a plasmid encoding huIL-15Rα-IL-15sc+huSTING N154S/R284G tazCTT on M1 and M2 phenotypes following infection.

[1709] Frozen human monocytes, isolated from healthy human donors, were thawed in complete medium (RPMI-1640+10% FBS), and washed by washed by centrifugation for 10 minutes at 600×g at room temperature. Monocytes were resuspended in ImmunoCult™-SF Macrophage Medium (StemCell Technologies) containing 100 ng/mL human M-CSF. Monocytes (2.5e5 per well) then were seeded in a 48-well plate with a final volume of 500 μL. Five days later (on day 5), fresh medium with cytokines was added to generate M1 and M2 macrophages. To generate primary human M1 macrophages, 250 μL of ImmunoCult™-SF Macrophage Medium containing 10 ng/mL LPS+50 ng/mL IFNγ was added per well and incubated for 48 hours. To generate primary human M2 macrophages, 250 μL of ImmunoCult™-SF Macrophage Medium containing 150 ng/mL human M-CSF+60 ng/mL human IL-4+60 ng/mL human IL-10 was added per well and incubated for 48 hours.

[1710] On day 7, duplicate wells were infected at an MOI of 10, for two hours in RPMI, with the YS1646Δasd/ΔFLG/ΔpagP/ΔansB/ΔcsgD strain containing a plasmid encoding huIL-15Rα-IL-15sc+huSTING N154S/R284G tazCTT. The cells then were washed 3 times with PBS and resuspended in RPMI+100 μg/mL gentamicin (Sigma). After 48 hours, the cells either were collected for gene expression analysis using qPCR analysis (as previously mentioned) or for cell surface protein expression analysis using flow cytometry.

[1711] For qPCR analysis, the cells were collected for RNA isolation using the RNeasy® Plus Mini Kit (Qiagen), according to the manufacturer's instructions. Total RNA concentration was measured using a NanoDrop™ 2000 UV-Vis Spectrophotometer (Thermo Scientific). The purity of each sample also was assessed from the A₂₆₀/A₂₃₀ absorption ratio. Synthesis of cDNA was performed from 0.5-1 μg of template RNA using a CFX96™ Real-Time System (Bio-Rad) and iScript™ Reverse Transcription Supermix for RT-qPCR (Bio-Rad) in a 20 μL reaction, according to the manufacturer's instructions. qPCR was performed with a CFX96 Real-Time System (Bio-Rad). Custom qPCR primers for IL-15 (For: 5′-GCAAGAGGAATTTGCCATCG; Rev: 5′-TTGCTCCATCCCGCTAATG) and STING (For: AACTCTGGTTTCAAGCGTAAAG; Rev: CAGGGCAGGGTCTCTAATG), SEQ ID NOS: 496-499, respectively, were prepared.

[1712] The qPCR reaction (20 μL) was conducted per protocol, using either the SsoAdvanced Universal SYBR® Green Supermix or the iQ Multiplex Powermix (Bio-Rad). The standard thermocycling program on the Bio-Rad CFX96 Real-Time System included a 95° C. denaturation for 150 sec, followed by 39 cycles of 95° C. for 15 sec and 60° C. for 55 sec. Quantification of the target mRNA was normalized using Actin reference mRNA (Bio-Rad, qHsaCEP0036280). ΔC_{q} was calculated as the difference between the target and reference gene.

[1713] As shown in the table below, expression of the IL-15 (IL-15/IL-15R alpha chain complex) and STING was compared among untreated M1 and M2 macrophages controls, the YS1646Δasd/ΔFLG/ΔpagP/ΔansB/ΔcsgD strain containing a plasmid control, and YS1646Δasd/ΔFLG/ΔpagP/ΔansB/ΔcsgD strain containing a plasmid encoding huIL-15Rα-IL-15sc+huSTING N154S/R284G tazCTT expression on macrophages. STACT in this table, and those below, refers to the immunostimulatory bacterium strain YS1646Δasd/ΔFLG/ΔpagP/ΔansB/ΔcsgD.

| | Fold Expression Over Reference Gene | |
|---|---|---|
| Treatments | IL-15 | STING |
| M1 Macs Untreated | 6.30E−07 | 2.25E−06 |
| M1 + STACT plasmid control | 2.65E−06 | 3.90E−06 |
| M1 + STACT IL-15 + STING | 7.90E−05 | 3.45E−05 |
| M2 Macs Untreated | 3.15E−06 | 0.00E−00 |
| M2 + STACT plasmid control | 0.00E−00 | 0.00E−00 |
| M2 + STACT IL-15 + STING | 1.75E−03 | 6.15E−04 |

[1714] The data show that the M1 macrophages did not express the plasmid-encoded payloads. Since, it was found that M1 macrophages were not capable of expressing plasmid payloads following infection, the next study focused on characterizing the M2-specific phenotypes of M2 macrophages following infection with the bacteria. For this, a study was performed to determine the phenotype of primary human M2 macrophages infected with the YS1646Δasd/ΔFLG/ΔpagP/ΔansB/ΔcsgD strain containing a plasmid encoding huIL-15Rα-IL-15sc and huSTING N154S/R284G tazCTT. As shown below, the M2 macrophage were converted to a hybrid M1/M2 phenotype.

[1715] Frozen human monocytes, isolated from healthy human donors, were thawed in complete medium (RPMI-1640+10% FBS), and washed by washed by centrifugation for 10 minutes at 600×g at room temperature. Monocytes were resuspended in ImmunoCult™-SF Macrophage Medium (StemCell Technologies) containing 100 ng/mL human M-CSF. Monocytes (2.5e5 per well) then were seeded in a 48-well plate with a final volume of 500 μL. Five days later (on day 5), fresh medium with cytokines were added to generate M2 macrophages. To generate primary human M2 macrophages, 250 μL of ImmunoCult™-SF Macrophage Medium containing 150 ng/mL human M-CSF+60 ng/mL human IL-4+60 ng/mL human IL-10 was added per well and incubated for 48 hours.

[1716] On day 7, duplicate wells were infected at an MOI of 10, for two hours in RPMI, with the YS1646Δasd/ΔFLG/ΔpagP/ΔansB/ΔcsgD strains containing plasmids encoding human i-actin as a plasmid control, huIL-15Rα-IL-15sc alone, huSTING N154S/R284G tazCTT alone, or huIL-15Rα-IL-15sc+huSTING. The cells then were washed 3 times with PBS and resuspended in RPMI+100 μg/mL gentamicin (Sigma). As controls, human M1 macrophages were generated in 10 ng/mL LPS+50 ng/mL IFNγ. and human M2 macrophages were treated either alone or in combination with recombinant huIL-15 or the small molecule STING agonist Rp,Rp, a synthetic analog of c-di-AMP with a 3′5′ mixed linkage and a disulfide bridge in the R,R confirmation (Invivogen).

[1717] After 48 hours, supernatants were harvested and evaluated for downstream signaling differences using a custom human M2/M1 U-Plex® panel (Meso Scale Discovery), according to the manufacturer's protocol. Cytokine secretion was measured, and the average of the duplicate was calculated. The cells were either collected for gene expression analysis using qPCR analysis or cell surface protein expression analysis using flow cytometry.

[1718] For qPCR analysis, the cells were collected for RNA isolation using the RNeasy® Plus Mini Kit (Qiagen), according to the manufacturer's instructions. Total RNA concentration was measured using a NanoDrop™ 2000 UV-Vis Spectrophotometer (Thermo Scientific). The purity of each sample also was assessed from the A₂₆₀/A₂₃₀ absorption ratio. Synthesis of cDNA was performed from 0.5-1 μg of template RNA using a CFX96™ Real-Time System (Bio-Rad) and iScript™ Reverse Transcription Supermix for RT-qPCR (Bio-Rad) in a 20 μL reaction, according to the manufacturer's instructions. qPCR was performed with a CFX96 Real-Time System (Bio-Rad). PrimePCR™ Probe Assay for huCD80 (qHsaCIP0026764), huCD86 (qHsaCEP0050792), huCCR7 (qHsaCIP033364), huCXCL10 (qHsaCEP0053880), huCXCL11 (qHsaCEP0024091), huCD14 (qHsaCEP0053971), huCD206 (qHsaCIP0039797), CD209 (qHsaCEP0049877), huCD68 (qHsaCED0007025) and huCD163 (qHsaCIP0028398) (All from Bio-Rad). The qPCR reaction (20 μL) was conducted per protocol, using either the SsoAdvanced Universal SYBR® Green Supermix or the iQ Multiplex Powermix (Bio-Rad). The standard thermocycling program on the Bio-Rad CFX96 Real-Time System consisted of a 95° C. denaturation for 150 sec, followed by 39 cycles of 95° C. for 15 sec and 60° C. for 55 sec. Quantification of the target mRNA was normalized using Actin reference mRNA (Bio-Rad, qHsaCEP0036280). ΔC_{q} was calculated as the difference between the target and reference gene.

[1719] For flow cytometry analysis, cells were washed with 500-uL of DPBS and detached by incubating with 10-mM EDTA in PBS on ice for 20-min. Lifted cells were washed once with flow buffer (PBS+2% FBS) and resuspended in 100-uL of LIVE/DEAD Violet Fixable Viability Dye. After 20-min incubation at RT, cells were washed once with flow buffer and resuspended in 50 μL of flow buffer containing True-Stain Monocyte Blocker and Human TruStain FcX. After 10-min incubation on ice, cell surface flow cytometry antibodies CD80 BV605 clone 2D10; CD14 BV650 clone M5E2; PD-L1 BV785 clone 2E9.2A3; CCR7 AF488 cloneG043H7; CD206 PE-CF594 clone 15-2; PD-1 PE-Cy7 clone EH12.2H7; CD209 APC clone 9E9A8; and CD163 APC-Cy7 clone GHI/61 (all from BioLegend) were added. After 20-min of incubation on ice and in the dark, cells were washed twice with flow buffer. Cells then were resuspended in flow buffer and data were acquired using the NovoCyte® flow cytometer (ACEA Biosciences, Inc.) and analyzed using FlowJo™ software (Tree Star, Inc.).

[1720] As shown in the table below, compared to the untreated M2 macrophages control, all YS1646Δasd/ΔFLG/ΔpagP/ΔansB/ΔcsgD strains containing plasmid-encoded payloads induced high expression of the M1-like macrophage markers CD80, CD86, CCR7, HLA-A, CXCL10 and CXCL11. These macrophages also induced expression of IFNβ, with the highest expression in the huIL-15Rα-IL-15sc+huSTING N154S/R284G tazCTT group, which was higher than either the huSTING N154S/R284G tazCTT strain alone, or M2 macrophages treated with the small molecule STING agonist RpRp, demonstrating payload-dependent effects. Importantly, all bacterially infected M2 macrophages maintained high levels of M2-like surface expression of pattern recognition receptors and scavenger receptors, such as CD14, CD163 and CD209, as compared to M1 macrophages. Importantly, expression of the costimulatory receptor CD80 was highest in the huSTING N154S/R284G tazCTT and huIL-151Rα-IL-15sc+huSTING N154S/R284G tazCTT strains, and the huIL-15Rα-IL-15sc+huSTING N154S/R284G tazCTT strain had the highest IFNβ and CD86 co-stimulatory expression, also demonstrating payload dependence for these targets.

| | | | | | Secretion Level | | | | | |
|---|---|---|---|---|---|---|---|---|---|---|
| | Cell Surface Expression (MFI) | | | | (pg/mL) | | Fold Expression Over Reference Gene | | | |
| Treatment | CD80 | CCR7 | CD14 | CD209 | CXCL10 | CXCL11 | IFNb1 | CD86 | CD163 | HLA-A |
| M1 Macs | 1.78E+04 | 1.12E+04 | 3.85E+04 | 3.52E+03 | 5.96E+04 | 1.67E+02 | 9.32E−02 | 8.16E−02 | 3.56E−01 | 5.98E−01 |
| Untreated | | | | | | | | | | |
| M2 Macs | 6.00E+03 | 5.77E+03 | 1.73E+04 | 9.69E+04 | 2.53E+01 | 6.21E+00 | 1.54E−02 | 2.18E−02 | 1.79E−01 | 1.25E−01 |
| Untreated | | | | | | | | | | |
| M2 + | 7.48E+03 | 6.00E+03 | 1.91E+04 | 9.34E+04 | 1.46E+04 | 5.33E+01 | 3.19E−02 | 3.88E−02 | 1.81E−01 | 2.54E−01 |
| RpRp | | | | | | | | | | |
| M2 + | 7.97E+03 | 6.33E+03 | 2.15E+04 | 7.39E+04 | 2.26E+04 | 1.78E+02 | 2.56E−02 | 3.28E−02 | 1.28E−01 | 2.47E−01 |
| rhIL-15 + | | | | | | | | | | |
| RpRp | | | | | | | | | | |
| M2 + | 1.27E+04 | 9.33E+03 | 6.31E+04 | 3.29E+04 | 2.40E+04 | 7.36E+01 | 1.37E−01 | 1.78E−01 | 6.27E−01 | 9.90E−01 |
| STACT* | | | | | | | | | | |
| plasmid | | | | | | | | | | |
| control | | | | | | | | | | |
| M2 + | 1.41E+04 | 1.10E+04 | 6.08E+04 | 2.62E+04 | 5.42E+04 | 2.10E+02 | 3.17E−01 | 3.95E−01 | 2.27E−01 | 1.56E−00 |
| STACT* | | | | | | | | | | |
| STING | | | | | | | | | | |
| M2 + | 1.30E+04 | 1.13E+04 | 5.63E+04 | 2.65E+04 | 3.81E+04 | 1.42E+02 | 2.13E−01 | 2.48E−01 | 4.16E−01 | 1.15E−00 |
| STACT* | | | | | | | | | | |
| IL-15 | | | | | | | | | | |
| M2 + | 1.21E+04 | 1.12E+04 | 5.61E+04 | 2.87E+04 | 2.31E+04 | 7.71E+01 | 4.15E−01 | 4.98E−01 | 1.04E−01 | 1.91E−00 |
| STACT* | | | | | | | | | | |
| IL-15 + | | | | | | | | | | |
| STING | | | | | | | | | | |

*STACT refers to the immunostimulatory bacteria

[1721] The table below outlines the changes in phenotype of these hybrid macrophages. Interestingly, markers of phagocytosis such as CD209 were initially higher in M2 macrophages and not M, and infection retained expression of this marker.

TABLE
Markers Attributed to M1 and M2 Macrophage Phenotypes Post- Treatment

| | | | M1 or | Post- |
|---|---|---|---|---|
| Class | Target | Function | M2 | Treatment |
| Co- | CD80 | Co-stimulatory Signal | M1 | Upregulated |
| stimulatory | | | | |
| molecules | CD86 | Co-stimulatory Signal | M1 | Upregulated |
| Chemokine | CCR7 | Lymphocyte node (LN) homing of T- | M1 | Upregulated |
| signaling | | cells and DCs | | |
| | CXCL10 | Recruit T-cells | M1 | Upregulated |
| | CXCL11 | Recruit T-cells | M1 | Upregulated |
| Pattern | CD14 | Microbial-targeting (LPS) | M1/M2 | Upregulated |
| recognition | CD206 | Microbial-targeting (mannose) | M2 | Downregulated |
| receptors | | | | (upregulated |
| | | | | relative to M1) |
| | CD209 | Enhanced phagocytosis, microbial- | M2 | Downregulated |
| | | targeting (high mannose), viral pathogen | | (upregulated |
| | | clearance, cell trafficking, immune | | relative to M1) |
| | | synapse formation, T-cell proliferation | | |
| | CD68 | Tumor-associated macrophages (TAMs) | M1/M2 | Upregulated |
| Scavenger | CD163 | Microbial targeting (gram-negative) | M2 | Upregulated |
| receptors | | | | |

[1722] The next experiment assessed whether M1 macrophages lacking CD209 expression, or M2 macrophages with CD209 expression, are capable of phagocytosing apoptotic tumor cells, and the impact infection has on M2 macrophage phagocytic and efferocytic functions. For this, M1 and M2 macrophages were differentiated, and M2 macrophages infected with the YS1646Δasd/ΔFLG/ΔpagP/ΔansB/ΔcsgD strains containing plasmid payloads were assessed in phagocytosis of apoptotic tumor cells (efferocytosis) and bacterial phagocytosis assays. Frozen human monocytes, isolated from healthy human donors, were thawed in complete medium (RPMI-1640+10% FBS), and washed by washed by centrifugation for 10 minutes at 600×g at room temperature. Monocytes were resuspended in ImmunoCult™-SF Macrophage Medium (StemCell Technologies) containing 100 ng/mL human M-CSF. Monocytes (2.5e5 per well) then were seeded in a 48-well plate with a final volume of 500 μL. Five days later (on day 5), fresh medium with cytokines were added to generate M2 macrophages. To generate primary human M2 macrophages, 250 μL of ImmunoCult™-SF Macrophage Medium containing 150 ng/mL human M-CSF+60 ng/mL human IL-4+60 ng/mL human IL-10 was added per well and incubated for 48 hours.

[1723] On day 7, duplicate wells were infected at an MOI of 10, for two hours in RPMI, with the following YS1646Δasd/ΔFLG/ΔpagP/ΔansB/ΔcsgD strains containing plasmids encoding human i-actin as a plasmid control, huIL-15Rα-IL-15sc alone, huSTING N154S/R284G tazCTT alone, or huIL-15Rα-IL-15sc+huSTING. The cells then were washed 3 times with PBS and resuspended in RPMI+100 μg/mL gentamicin (Sigma). As controls, human M1 macrophages were generated in 10 ng/mL LPS+50 ng/mL IFNγ, and human M2 macrophages were treated either alone or in combination with recombinant huIL-15 or the small molecule STING agonist Rp,Rp.

[1724] After 48 hours, 1.5e5 CFSE-labeled apoptotic Raji (induced by 24 hours 1-mM H₂O₂ treatment) or pHrodo™ Green E. coli BioParticles™ Conjugate (Invitrogen) were added to each well and incubate at 37° C. After 3 hours, the cells were washed with 500-uL of DPBS and detached by incubating with 10-mM EDTA in PBS on ice for 20-min. Lifted cells were washed once with flow buffer (PBS+2% FBS) and resuspended in 50 μL of flow buffer containing True-Stain Monocyte Blocker and Human TruStain FcX. After 10-min incubation on ice, cell surface flow cytometry antibody SIRPα PE-Cy7 clone SE5A5 (BioLegend) were added. After 20-min of incubation on ice and in the dark, cells were washed twice with flow buffer. Cells then were resuspended in flow buffer and data were acquired using the NovoCyte® flow cytometer (ACEA Biosciences, Inc.) and analyzed using FlowJo™ software (Tree Star, Inc.). SIRPα-positive population was gated to differentiate macrophages from apoptotic Raji and pHrodo™ Green E. coli BioParticles™ Conjugate.

[1725] As shown in the table below, compared to untreated M2 macrophages control, all YS1646Δasd/ΔFLG/ΔpagP/ΔansB/ΔcsgD strains infected M2 macrophages had decreased apoptotic Raji phagocytosis capacity, but maintained high phagocytosis capacity when compared to the untreated M1 macrophages control. In addition, compared to other strains, the YS1646Δasd/ΔFLG/ΔpagP/ΔansB/ΔcsgD strain containing a plasmid encoding huIL-15Rα-IL-15sc+huSTING N154S/R284G tazCTT induced the highest bacteria bioparticle conjugate phagocytosis capacity.

| | Phagocytosis | |
|---|---|---|
| | [Median Fluorescence Intensity] | |
| | | pHrodo Green E. coli |
| Treatments | Apoptotic Raji | BioParticles Conjugate |
| M1 Macs Untreated | 1.34E+05 | 1.98E+06 |
| M2 Macs Untreated | 1.25E+06 | 3.51E+06 |
| M2 + RpRp | 1.60E+05 | N/A |
| M2 + rhIL-15 | 9.27E+06 | N/A |
| M2 + rhIL-15 + RpRp | 1.61E+05 | N/A |
| M2 + STACT plasmid control | 6.40E+05 | N/A |
| M2 + STACT STING | 6.66E+05 | 4.11E+06 |
| M2 + STACT IL-15 | 5.51E+05 | 3.17E+06 |
| M2 + STACT IL-15 + STING | 4.60E+06 | 6.06E+06 |

[1726] These data demonstrate the ability of immunostimulatory bacterial strains provided herein, such as YS1646Δasd/ΔFLG/ΔpagP/ΔansB/ΔcsgD containing a plasmid encoding huIL-15Rα-IL-15sc+huSTING N154S/R284G tazCTT or similar payload, to transform M2 macrophages into a hybrid M1/M2 macrophage phenotype that maintain M2-like scavenging receptors and phagocytic ability.

### Example 46

### Macrophage Phagocytosis and Cell Cycle Progression Are Required for Payload Delivery Following Infection of TLR 2/4/5 Attenuated Immunostimulatory Bacterial Strains Containing Plasmid Payloads

[1727] The finding in the Example above that M1 macrophages do not express the encoded payloads and that only M2 macrophages are able to express payloads following infection, prompted further questions and review to understand how and why the differentiation conditions result in impaired payload delivery or expression in M1 macrophage. Proliferating macrophages have been described in fibrotic diseases such as idiopathic pulmonary fibrosis (IPF) (Morse et al., (2019) Eur Respir J 54(2):1802441). Factors associated with M2 macrophage polarization, such as M-CSF, phagocytosis and efferocytosis, promote macrophage self-renewal (proliferation). Treatment with pro-inflammatory cytokines and other bacterial components associated with M1 polarization, such as IFNγ and lipopolysaccharide (LPS) from Gram-negative bacteria, as well as necrotic, hypoxic and adenosine-rich environments, inhibit cell cycle prevention (Röszer et al., (2018) Cells 7(8):103). The lack of proliferation of M1 macrophages makes sense from functional and metabolic standpoint, where the need for enhanced wound healing and phagocytic functions requires more macrophages, whereas bacterial pathogen sensing and production of pro-inflammatory cytokines is metabolically taxing and prevents cell cycle machinery, and also from the fact that M1 macrophages are terminally differentiated, and thus are not proliferating.

[1728] Proliferation is a requirement for plasmid gene transfer. The ability of transgene expression following transfection of plasmid DNA, where the DNA must enter the nucleus and be transcribed into mRNA, requires spindle breakdown to provide nuclear entry (Mortimer et al., (1999) Gene Therapy 6:403-411). Gene delivery into cells to facilitate plasmid transfer and gene expression is inefficient in non-dividing cells. Those in the gene therapy field pursued virally-delivered nucleic acids that integrate into the nucleus without requiring cell division (Kirchenbuechler et al, (2016) Erp. Cell Res. 345(1):1-15).

[1729] To assess the impact of bacterial sensing on M1 polarization, cell cycle inhibition, and the ability to express plasmid payloads, infections were performed in primary M2 macrophages with a series of the TLR-attenuated strains of the immunostimulatory bacteria provided herein. These were assessed for their ability to provide plasmid transfer following infection and expression of the secreted Nanoluciferase® (NanoLuc®, Promega) protein. For this, the parental YS1646 strain, which is a TLR2/4/5-intact strain, was compared to the TLR5 attenuated strain YS1646Δasd/ΔFLG, the TLR4 and TLR5 attenuated strain YS1646Δasd/ΔFLG/ΔpagP, and the TLR2/4/5 attenuated strain YS1646Δasd/ΔFLG/ΔpagP/ΔansB/ΔcsgD, all containing the NanoLuc® plasmid.

[1730] Frozen human monocytes, isolated from healthy human donors, were thawed in complete medium (RPMI-1640+10% FBS), and washed by washed by centrifugation for 10 minutes at 600×g at room temperature. Monocytes were resuspended in ImmunoCult™-SF Macrophage Medium (StemCell Technologies) containing 100 ng/mL human M-CSF. Monocytes (2.5e5 per well) then were seeded in a 48-well plate with a final volume of 500 μL. Five days later (on day 5), fresh medium with cytokines were added to generate M2 macrophages. To generate primary human M2 macrophages, 250 μL of ImmunoCult™-SF Macrophage Medium containing 150 ng/mL human M-CSF+60 ng/mL human IL-4+60 ng/mL human IL-10 was added per well and incubated for 48 hours.

[1731] On day 7, duplicate wells were infected at an MOI of 10, for two hours in RPMI, with the YS1646 and YS1646 TLR-attenuated strains containing a plasmid encoding NanoLuc®. The cells then were washed 3 times with PBS and resuspended in RPMI+100 μg/mL gentamicin (Sigma). After 48 hours, the cells were collected for gene expression analysis using qPCR analysis (described above).

[1732] For qPCR analysis, the cells were collected for RNA isolation using the RNeasy® Plus Mini Kit (Qiagen), according to the manufacturer's instructions. Total RNA concentration was measured using a NanoDrop™ 2000 UV-Vis Spectrophotometer (Thermo Scientific). The purity of each sample also was assessed from the A₂₆₀/A₂₃₀ absorption ratio. Synthesis of cDNA was performed from 0.5-1 μg of template RNA using a CFX96™ Real-Time System (Bio-Rad) and iScript™ Reverse Transcription Supermix for RT-qPCR (Bio-Rad) in a 20 μL reaction, according to the manufacturer's instructions and the average of the triplicate was calculated. qPCR was performed with a CFX96 Real-Time System (Bio-Rad). Custom primers were used for NanoLuc® detection. The qPCR reaction (20 μL) was conducted per protocol, using the SsoAdvanced Universal SYBR® Green Supermix (Bio-Rad). The standard thermocycling program on the Bio-Rad CFX96 Real-Time System consisted of a 95° C. denaturation for 150 sec, followed by 39 cycles of 95° C. for 15 sec and 60° C. for 55 sec. Quantification of the target mRNA was normalized using Actin reference mRNA (Bio-Rad, qHsaCEP0036280). ΔΔC_{q} was calculated as the difference between the treatments and the uninfected control.

[1733] As shown in the table below, compared to the untreated M2 macrophages or the parental YS1646 TLR2/4/5-intact strain, the TLR5 attenuated strain YS1646Δasd/ΔFLG and the TLR4 and TLR5 attenuated strain YS1646Δasd/ΔFLG/ΔpagP all containing the NanoLuc® plasmid, induced NanoLuc® expression. The TLR2/4/5 attenuated strain YS1646Δasd/ΔFLG/ΔpagP/ΔansB/ΔcsgD, containing the NanoLuc® plasmid induced significantly higher expression of NanoLuc, by more than 6-fold.

| | Fold Expression |
|---|---|
| | Relative to |
| | uninfected group |
| Treatments | NanoLuc® |
| YS1646 | 0.84E−01 |
| YS1646^{ΔFLG} + NanoLuc ® | 9.59E+00 |
| YS1646^{ΔFLG/ΔpagP} + NanoLuc ® | 7.77E+00 |
| YS1646^{ΔFLG/ΔpagP/ΔansB/ΔcsgD} + | 6.43E+01 |
| NanoLuc ® | |

[1734] In a separate experiment, human THP1 monocytes were induced to become more phagocytic and M2-like by the addition of M2 differentiation medium with the addition of osteopontin (SPP1) to enhance wound-healing macrophage properties, in order to assess whether these culture conditions could enhance phagocytosis and proliferation and therefore payload delivery. For this, human monocytic THP-1 cells were differentiated by PMA treatment for 3 days, followed by 2 days of culturing in either media-only or M2-differentiation media. For PMA treatment, THP-1 cells were cultured in RPMI-1640+10% FBS medium+50-ng/mL of PMA for 3 days. On day 3, media was aspirated and replace with either media or media+20 ng/mL IL-4+20 ng/mL IL-10+500 ng/mL human osteopontin. On day 5, cells were infected in duplicate at an MOI of 100 using thawed injection stocks, followed by centrifugation at 500 relative centrifugal force (rcf) for 5 minutes and incubation at 37° C. for 2 hours. After 2 hours, the cells were washed three times in DPBS and fresh RPMI-1640+10% FBS medium was added with a gentamycin concentration of 50 μg/ml.

[1735] For the phagocytosis assay, 1.5e5 CFSE-labeled apoptotic Raji (induced by 24 hours 1-mM H₂O₂ treatment) or pHrodo™ Green E. coli BioParticles™ Conjugate (Invitrogen) were added to each well and incubate at 37° C. After 3 hours, the cells were washed with 500-uL of DPBS and detached by incubating with 10-mM EDTA in PBS on ice for 20-min. Lifted cells were washed once with flow buffer (PBS+2% FBS) and resuspended in 50 μL of flow buffer containing True-Stain Monocyte Blocker and Human TruStain FcX. After 10-min incubation on ice, cell surface flow cytometry antibody SIRPα PE-Cy7 clone SE5A5 (BioLegend) were added. After 20-min of incubation on ice and in the dark, cells were washed twice with flow buffer. Cells then were resuspended in flow buffer and data were acquired using the NovoCyte® flow cytometer (ACEA Biosciences, Inc.) and analyzed using FlowJo™ software (Tree Star, Inc.). SIRPα-positive population was gated to differentiate macrophages from apoptotic Raji and pHrodo™ Green E. coli BioParticles™ Conjugate. Supernatant osteopontin concentrations were measured using the Human Osteopontin Quantikine® ELISA Kit (R&D Systems).

[1736] For qPCR analysis, the cells were collected for RNA isolation using the RNeasy® Plus Mini Kit (Qiagen), according to the manufacturer's instructions. Total RNA concentration was measured using a NanoDrop™ 2000 UV-Vis Spectrophotometer (Thermo Scientific). The purity of each sample also was assessed from the A₂₆₀/A₂₃₀ absorption ratio. Synthesis of cDNA was performed from 0.5-1 μg of template RNA using a CFX96™ Real-Time System (Bio-Rad) and iScript™ Reverse Transcription Supermix for RT-qPCR (Bio-Rad) in a 20 μL reaction, according to the manufacturer's instructions, and the average of the triplicate was calculated. qPCR was performed with a CFX96 Real-Time System (Bio-Rad). Custom primers were used for NanoLuc® detection. The qPCR reaction (20 μL) was conducted per protocol, using the SsoAdvanced Universal SYBR® Green Supermix (Bio-Rad). The standard thermocycling program on the Bio-Rad CFX96 Real-Time System consisted of a 95° C. denaturation for 150 sec, followed by 39 cycles of 95° C. for 15 see and 60° C. for 55 sec. Quantification of the target mRNA was normalized using Actin reference mRNA (Bio-Rad, qHsaCEP0036280). ΔΔC_{q} was calculated as the difference between the treatments and the uninfected control.

[1737] As shown in the tables below, compared to PMA-treated THP-1 cells, the addition of M2-differentiation medium containing osteopontin increased THP-1 phagocytosis capacity as well as its osteopontin secretion. Gene expression of the NanoLuc® payload, however, was not detected, demonstrating an inability to express payloads, despite having an M2-like macrophage phenotype.

| | Phagocytosis of | |
|---|---|---|
| | Apoptotic Jurkat cells | Osteopontin |
| | [Median | Secretion |
| Treatments | Fluorescence Intensity] | (ng/mL) |
| PMA THP-1 | 1.26E+05 | 2.81E+02 |
| PMA + M2 THP-1 | 2.14E+05 | 4.04E+02 |

| | NanoLuciferase ® |
|---|---|
| Treatment | (Luminescence) |
| Uninfected | 44.96 ± 4.35 |
| STACT NanoLuc® | 50.76 ± 7.25 |

[1738] The finding that culture conditions designed to promote a M2-like macrophage with enhanced phagocytic functions still prevents plasmid expression was not expected, and prompted further queries, which revealed that the PMA treatment was responsible. In a published experiment, PMA-treated THP1 cells were assessed over a 96-hour time course by Cap Analysis of Gene Expression (CAGE) for transcriptional regulation. The PMA-treated cells became adherent as expected, but the numbers of cells entering S phase and exiting G2/M was significantly reduced. Within 2 hours, early macrophage differentiation genes such as MAFB were induced, and cell proliferation genes such as MYC were reduced (Gažová et al., (2020) Front. Cell Dev. Biol. 8:498). The transcription factors Maf-B and c-Maf have been described to control macrophage self-renewal, with upregulation impairing proliferation, dependent on suppression of MYC and other proliferation markers such as the mitotic checkpoint gene BUB1 (Aziz et al., (2009) Science 326:867:71; Soucie et al., (2016) Science 351(6274):aad5510). In human macrophages treated with agonists of the cytosolic RNA sensors RIG-I and MDA5, expression of MAFB suppressed the production of type I IFN (Kim et al., (2010) Nat Immunol. 11(8):743-50).

[1739] In order to determine whether PMA treatment was similarly impairing THP1 proliferation, untreated THP1 cells were compared to PMA-treated cells and assessed for gene expression of proliferation markers. For this, THP-1 cells were cultured in either the presence or absent of 50 ng/mL PMA for 48 hrs. Cells were collected for RNA isolation using the RNeasy® Plus Mini Kit (Qiagen), according to the manufacturer's instructions. Total RNA concentration was measured using a NanoDrop™ 2000 UV-Vis Spectrophotometer (Thermo Scientific). The purity of each sample also was assessed from the A₂₆₀/A₂₃₀ absorption ratio. Synthesis of cDNA was performed from 0.5-1 μg of template RNA using a CFX96™ Real-Time System (Bio-Rad) and iScript™ Reverse Transcription Supermix for RT-qPCR (Bio-Rad) in a 20 μL reaction, according to the manufacturer's instructions. qPCR was performed with a CFX96 Real-Time System (Bio-Rad). PrimePCR™ Probe Assay for huMAFB (qHsaCEP0024306), huMAF (qHsaCEP0054577), huSTMN1 (qHsaCIP0041274), huMYC (qHsaCIP0028650) and huBUB1 (qHsaCIP0033109) (All from Bio-Rad). The qPCR reaction (20 μL) was conducted per protocol, using either the SsoAdvanced Universal SYBR® Green Supermix or the iQ Multiplex Powermix (Bio-Rad). The standard thermocycling program on the Bio-Rad CFX96 Real-Time System consisted of a 95° C. denaturation for 150 sec, followed by 39 cycles of 95° C. for 15 sec and 60° C. for 55 sec. Quantification of the target mRNA was normalized using Actin reference mRNA (Bio-Rad, qHsaCEP0036280). ΔC_{q} was calculated as the difference between the target and reference gene.

[1740] As shown in the table below, PMA treatment suppresses proliferation-associated genes such as MYC and BUB1. The proliferation-inhibiting transcription factors MAFB and MAF were induced by PMA treatment, blocking cell cycle progression. These data further show the importance of promoting cell cycle in order to transfer plasmids and express encoded payloads.

| | Fold Expression Over Reference Gene | | | |
|---|---|---|---|---|
| Treatments | MAFB | MAF | MYC | BUB1 |
| THP-1 untreated | 0.00E+00 | 6.47E−04 | 1.11E−01 | 3.90E−02 |
| PMA THP-1 | 1.55E+00 | 7.17E−02 | 4.87E−02 | 2.30E−03 |

[1741] A follow-up study was performed to determine whether THP1 cells cultured with M-CSF could promote proliferation and payload delivery, as compared to the PMA-treated terminally differentiated THP-1 cells. Both were infected with the YS1646Δasd/ΔFLG/ΔpagP/ΔansB/ΔcsgD strain containing a plasmid encoding huIL-15Rα-IL-15sc+huSTING N154S/R284G tazCTT, or the NanoLuc® plasmid control, and compared to uninfected but differentiated THP1 cells for evidence of payload delivery.

[1742] THP-1 cells were either terminally differentiated by PMA treatment prior to infection with the immunostimulatory bacteria, or treated with M-CSF to promote cell cycle progression after infection. For PMA treatment, THP-1 cells were cultured in RPMI-1640+10% FBS medium+50 ng/mL of PMA for 5 days. On day 5, duplicate wells were infected at an MOI of 100, for one hour in RPMI, with the YS1646Δasd/ΔFLG/ΔpagP/ΔansB/ΔcsgD strain containing a plasmid encoding huIL-15Rα-IL-15sc+huSTING N154S/R284G tazCTT. The cells then were washed 3 times with PBS and resuspended in RPMI+100 μg/mL gentamicin (Sigma). For the M-CSF-treated THP-1 cells still in suspension, THP-1 cells in 5-mL tubes were infected at an MOI of 100, for one hour in RPMI, with the YS1646Δasd/ΔFLG/ΔpagP/ΔansB/ΔcsgD strain containing a plasmid encoding huIL-15Rα-IL-15sc+huSTING N154S/R284G tazCTT. The cells were then supplemented with RPMI-1640+10% FBS medium at a final concentration of 100 μg/mL gentamicin (Sigma) and 100 ng/ml M-CSF. After 48 hours, supernatants were harvested, cleared of cell debris, and analyzed for cytokine profile using a U-Plex® (Meso Scale Discovery).

[1743] As shown in the table below, infected THP1 monocytes that were treated with M-CSF, but not PMA, responded to infection in a payload-dependent manner. IFN-β, CXCL10/IP-10, and SPP1/OPN were highest after infection with YS1646Δasd/ΔFLG/ΔpagP/ΔansB/ΔcsgD strain containing a plasmid encoding huIL-15Rα-IL-15sc+huSTING N154S/R284G tazCTT, as compared to the Nanoluc® control or the uninfected, but only if the cells were pretreated with M-CSF, as PMA ablated the payload response. IL-6 displayed a payload-dependent response only with the M-CSF-treated cells. These data demonstrate that cells that are differentiated to promote proliferation express plasmid-encoded payloads.

| | IFN- β | | CXCL10/IP-10 | | IL-6 | | SPP1/OPN | |
|---|---|---|---|---|---|---|---|---|
| Treatment | PMA | M-CSF | PMA | M-CSF | PMA | M-CSF | PMA | M-CSF |
| Uninfected | 27.9 | 2.5 | 221.48 | 24.9 | 1.45 | 0.272 | 4.9E5 | 1.E3 |
| STACT NanoLuc ® | 27.33 | 8.46 | 16.52 | 467.06 | 27.81 | 92.5 | 1.3E5 | 2.2E3 |
| STACT IL-15 + | 35.18 | 27.06 | 28.85 | 1562.62 | 141.66 | 195.7 | 1E5 | 9.4E3 |
| eSTING | | | | | | | | |

[1744] In a previous biodistribution study performed with an immunostimulatory bacteria provided herein (see, co-owned International PCT Publication No. WO2021/097144) containing the plasmid payload expressing NanoLuc®, it was demonstrated that while the bacteria could be found at a steady state in the spleens and livers of tumor-colonized mice, the NanoLuc® payload was detected in the tumor. Data and results shown herein show why splenic macrophages and liver Kupffer cells, each of which is highly phagocytic, do not express plasmid-encoded payloads. A study was performed to determine whether primary human M2 macrophages, but not Kupffer or HUVEC, infected with the YS1646Δasd/ΔFLG/ΔpagP/ΔansB/ΔcsgD strain containing a plasmid encoding huIL-15Rα-IL-15sc+huSTING N154S/R284G tazCTT, induces efficient payload delivery.

[1745] Frozen human monocytes, isolated from healthy human donors, were thawed in complete medium (RPMI-1640+10% FBS), and washed by washed by centrifugation for 10 minutes at 600×g at room temperature. Monocytes were resuspended in ImmunoCult™-SF Macrophage Medium (StemCell Technologies) containing 100 ng/mL human M-CSF. Monocytes (2.5e5 per well) then were seeded in a 48-well plate with a final volume of 500 μL. Five days later (on day 5), fresh medium with cytokines were added to generate M2 macrophages. To generate primary human M2 macrophages, 250 μL of ImmunoCult™-SF Macrophage Medium containing 150 ng/mL human M-CSF+60 ng/mL human IL-4+60 ng/mL human IL-10 was added per well and incubated for 48 hours. Kupffer and HUVEC cells were seeded one day prior to infection, with the Kupffer cells seeded in Collagen-I treated wells.

[1746] On day 7, duplicate wells were infected at an MOI of 100, for two hours in RPMI, with the YS1646Δasd/ΔFLG/ΔpagP/ΔansB/ΔcsgD strain containing a plasmid encoding huIL-15Rα-IL-15sc+huSTING N154S/R284G tazCTT or NanoLuciferase® and compared to the strains encoding huIL-15Rα-IL-15sc or huSTING N154S/R284G tazCTT alone. The cells then were washed 3 times with PBS and resuspended in RPMI+100 μg/mL gentamicin (Sigma). After 48 hours, supernatants were harvested, cleared of cell debris and analyzed for cytokine profile using a U-Plex® (Meso Scale Discovery).

[1747] For qPCR analysis, the cells were collected for RNA isolation using the RNeasy® Plus Mini Kit (Qiagen), according to the manufacturer's instructions. Total RNA concentration was measured using a NanoDrop™ 2000 UV-Vis Spectrophotometer (Thermo Scientific). The purity of each sample also was assessed from the A₂₆₀/A₂₃₀ absorption ratio. Synthesis of cDNA was performed from 0.5-1 μg of template RNA using a CFX96™ Real-Time System (Bio-Rad) and iScript™ Reverse Transcription Supermix for RT-qPCR (Bio-Rad) in a 20 μL reaction, according to the manufacturer's instructions. qPCR was performed with a CFX96 Real-Time System (Bio-Rad). Custom qPCR primers, described in the Example above, for IL-15 (For: 5′-GCAAGAGGAATTTGCCATCG; Rev: 5′-TTGCTCCATCCCGCTAATG) and STING (For: AACTCTGGTTTCAAGCGTAAAG; Rev: CAGGGCAGGGTCTCTAATG) (SEQ ID NOS: 496-499, respectively) were prepared. The qPCR reaction (20 μL) was conducted per protocol, using either the SsoAdvanced Universal SYBR® Green Supermix or the iQ Multiplex Powermix (Bio-Rad). The standard thermocycling program on the Bio-Rad CFX96 Real-Time System was a 95° C. denaturation for 150 sec, followed by 39 cycles of 95° C. for 15 sec and 60° C. for 55 sec. Quantification of the target mRNA was normalized using Actin reference mRNA (Bio-Rad, qHsaCEP0036280). ΔC_{q} was calculated as the difference between the target and reference gene.

[1748] As shown in the table below, the immunostimulatory bacteria encoding huIL-15Rα-IL-15sc+huSTING N154S/R284G tazCTT induced high level of payload expression in M2 macrophages, but not in Kupffer cells or HUVECs. The proliferating HUVEC cell line and the M2 macrophages demonstrated 10-fold higher expression of the mitotic destabilization gene stathmin1 (STMN1), as compared to the expression in Kupffer cells.

| | Fold Expression Over Reference Gene | | |
|---|---|---|---|
| Treatments | STMN1 | IL-15 | eSTING |
| M2 Untreated | 5.55E−02 | 5.25E−06 | 0.00E−00 |
| M2 + STACT IL-15 + STING | — | 8.80E−03 | 1.40E−02 |
| Kupffer Untreated | 3.70E−03 | 4.65E−05 | 2.55E−05 |
| Kupffer + STACT IL-15 + | — | 3.30E−03 | 3.30E−03 |
| STING | | | |
| HUVEC Untreated | 6.05E−02 | 3.05E−06 | 0.00E+00 |
| HUVEC + STACT IL-15 + | — | 1.15E−04 | 2.00E−04 |
| STING | | | |

[1749] An analysis of the cytokine expression profile from M2 macrophages, Kupffer and HUVEC cells infected with YS1646Δasd/ΔFLG/ΔpagP/ΔansB/ΔcsgD strain containing a plasmid encoding huIL-15Rα-IL-15sc+huSTING N154S/R284G tazCTT are shown below. Only M2 macrophages expressed IFN-β, IP-10/CXCL10 and I-TAC/CXCL11 in a payload-dependent manner. Kupffer cells, which are highly phagocytic but do not proliferate, do not induce a payload-dependent cytokine profile. HUVEC cells are not phagocytic, and therefore less permissive to infection.

| | M2 Macrophages | | | Kupffer | | | HUVEC | | |
|---|---|---|---|---|---|---|---|---|---|
| | IFN-β | IP-10 | I-TAC | IFN-β | IP-10 | I-TAC | IFN-β | IP-10 | I-TAC |
| Uninfected | 3.05 | 14.43 | 3.9 | 3.05 | 36.36 | 11.86 | 3.05 | 2.55 | 4.73 |
| NanoLuc ® | 15.82 | 2852 | 5.66 | 3.61 | 125 | 19.77 | 5.4 | 231 | 15.03 |
| IL-15 + | 43.5 | 12590 | 48.55 | 3.05 | 199 | 20.81 | 3.79 | 208 | 15.26 |
| eSTING | | | | | | | | | |

### Example 47

### Classification of Tumor-Associated Macrophages by Their SPP1 or C1QC Phenotypes Reveals a Higher Association of SPP1 with Poor Overall Survival Than for C1QC

[1750] Among the tumor-resident myeloid cells across solid tumor types, macrophages exhibit the most functional diversity. There are at least 12 different macrophage classifying markers, with the three most commonly found across histologies as ISG15, C1QC, and SPP1. ISG15 macrophages, named for the expression of one of many type I IFN-inducible genes, have several markers that resemble the classical M1 macrophages. In contrast, SPP1 and C1QC have markers more attributed to M2 macrophages (Cheng et al., (2021) Cell 184(3):792-809). SPP1⁺ TAMs, named for expression of osteopontin (SPP1), display more wound healing and angiogenic phenotypes, as well as the ability to opsonize using osteopontin to enhance phagocytosis (Schack et al., (2009) J Immunol 182(11):6943-50). C1QC⁺ TAMs are the most abundant TAMs across tumor types, and are named for one of the three genes, CIQA, C1QB, and C1QC, of the C1q complement factor that opsonizes and enhances phagocytosis (Fraser et al., (2009) J Immunol 183(10):6175-85). In addition, C1QC upregulation induces expression of the surface receptor MERTK, which provides phagocytosis of apoptotic cells (Zhou et al., (2020) Immunity 52(2):357-373). MERTK was found to be co-expressed with SPP1 in idiopathic pulmonary fibrosis (IPF) and attributed to a highly phagocytic and proliferative macrophage phenotype (Morse et al., (2019) Eur Respir J 54(2):1802441). In colorectal cancer (CRC), SPP1^{high}C1QC^{low} TAMs were associated with the lowest overall survival (OS), while C1QC^{high}SPP1^{low} TAMs were associated with the highest OS (Zhang et al., (2020) Cell 181:442-59). Due to the plasticity of these macrophage subtypes, a bioinformatics analysis was performed to determine the expression of SPP1 and C1QC in tumors vs. healthy tissue, as well as their association with tumor histologies.

[1751] For the expression of SPP1 and C1QC in tumor vs. healthy tissue, gene expression data from The Cancer Genome Atlas (TCGA) was downloaded from Firehose's normalized matrices and log 2 transformed. The clinical data was downloaded from the NCI clinical TCGA database (cancer.gov). Using TCGA gene expression of tumor types with >10 samples, p-values were calculated using the Mann Whitney U test. Distributions of SPP1 or C1QC expression between tumor and normal samples and the direction determined using the estimate from a generalized linear model were compared. Color of p-value represents direction; gray p-value, lower in tumor; light gray p-value, higher in tumor; very light gray p-value, no significance. The cancer types are ordered by the median expression of the tumor samples.

[1752] SPP1 was broadly upregulated in tumor tissues vs. normal tissue, and highly upregulated in lung squamous (LUSC) and lung adenocarcinoma (LUAD), breast cancer (BRCA), head and neck squamous cell carcinoma (HNSCC), gastric (stomach) adenocarcinoma (STAD), liver hepatocellular carcinoma (LIHC) and colorectal adenocarcinoma (COAD) (see FIG. 18). Kidney clear cell (KIRC) was the only tumor type that had higher expression of SPP1 in normal tissues as compared to tumor tissue. In direct contrast to the SPP1 results, C1QC is not broadly upregulated in tumor tissues, yet is upregulated in kidney tumors, head and neck, esophageal and thyroid (see FIG. 19). In contrast, tumors such as lung, liver and colon had much lower C1QC expression in tumors vs. healthy tissue. The results are set forth in FIGS. 18 and 19.

[1753] For the association of SPP1 and C1QC with OS, gene expression from TCGA was used to calculate the Cox proportional hazard regression model, to test for the association between prognosis and expression of SPP1 or C1QC as a continuous variable. The results are displayed as a forest plot, which shows the results for all tumor types with >20 events (see FIGS. 21 and 22, for SPP1 and C1QC respectively). The shape of the dot represents the p-value, with a triangle representing p<0.05. The dot is the hazard ratio for each comparison and the black lines are the 95% confidence intervals.

[1754] SPP1 was associated with poor survival across many tumor types, with significant associations found in low grade glioma (LGG), cervical squamous carcinoma (CESC), pancreatic adenocarcinoma (PAAD) and liver cancer. Uveal melanoma (UVM) was the only cancer type that had a significant negative association. In contrast to SPP1, C1QC was significantly associated with less tumor types (4 vs. 7), with positively significant associations found in low grade glioma, kidney renal carcinoma (KIRC), and interestingly in uveal melanoma, opposite to that found for SPP1. Melanoma (SKCM) was the only tumor type where C1QC expression was significantly associated with better survival. The results are set forth in FIGS. 21 and 22.

[1755] In previous forest plots, SPP1 was associated with poor survival in colon adenocarcinoma (COAD) (p=0.06), while for C1QC, there was no association with overall survival (OS). Colorectal cancer (CRC), which includes colon (COAD) and rectal adenocarcinoma (READ) cancer has been classified into Consensus Molecular Subtypes (CMS) based on myeloid/T-cell ratios and tumor immunophenotypes, and validated across the TCGA, PDX, CMScaller, CRIS and CIRC databases (Guinney et al., (2015) Nat Med. 21(11):1350-6; Lee et al., (2020) Nature Genetics 52(6):594-603). CMS4, comprising 23% of CRC patients, has the highest myeloid/T-cell ratio, with a more mesenchymal, TGFβ-driven, wound-healing phenotype and the poorest overall survival. CMS1 at 14% of CRC has the next highest myeloid/T-cell ratio, with the most inflamed phenotype and high microsatellite instability (MSI-high), thus a high tumor mutation burden and sensitivity to CPI, and the highest OS. CMS3 at 13% has a dysregulated metabolic phenotype and the lowest myeloid/T-cell ratio. The most common subtype at 37% of CRC is CMS2, with a low myeloid/T-cell ratio and an epithelial phenotype driven by WNT/β-catenin and MYC signaling pathways (Menter et al., (2019) Curr. Gastroenterol Rep 21(2):5).

[1756] A bioinformatics analysis was performed to assess the association of SPP1 and C1QC with OS, stratifying colon and rectal cancer together within their CMS subtypes. There were too few events (<10) to test CMS3. C1QC was negatively prognostic for CMS1 (p=0.05) and was the only significant association (see KM plot in FIG. 20).

[1757] For this analysis, box and whisker plots were generated from SPP1 (see FIG. 41) or C1QC (see FIG. 42) expression across TCGA, and compared to cancer types ordered by median expression. The COAD and READ colorectal cancers were separated into their CMS subtypes and plotted. The distribution of SPP1 expression and C1QC expression in TCGA by cancer type (colorectal cancer split by CMS) was calculated. For both SPP1 and C1QC, CMS4 and 1 had higher protein expression and association with poor OS compared to CMS2 and 3 (see FIGS. 41 and 42). For both SPP1 and C1QC, CMS2 and 3 had low expression and low association with OS compared to the other tumor types as well. If the associations were performed with the SPP1 and C1QC markers stratified into the 4 high and low subtypes, there would be a stronger association with SPP1^{high} C1QC^{low} and poor OS across CRC and possibly other tumor types (Zhang et al., (2020) Cell 181:442-59). In summary, SPP1⁺ TAMs have a much higher association across solid tumor types with poorer OS compared to C1QC, as well as much higher expression in tumors vs. healthy tissue.

### Example 48

### Infection of Immunomodulatory Bacterial Strains Containing Plasmids Encoding huIL-15Rα-IL-15sc and huSTING N154S/R284G tazCTT In Primary Human M2 Phenotype Macrophages Induces a Hybrid SPP1⁺/C1QC⁺ Phenotype

[1758] An experiment was performed to assess whether primary human monocyte-derived M1 and M2 macrophages express SPP1 and/or C1QC, and to determine whether YS1646Δasd/ΔFLG/ΔpagP/ΔansB/ΔcsgD strain containing a plasmid encoding huIL-15Rα-IL-15sc+huSTING N154S/R284G tazCTT altered the macrophage phenotypes beyond the canonical M1/M2 markers previously described.

[1759] Frozen human monocytes, isolated from healthy human donors, were thawed in complete medium (RPMI-1640+10% FBS), and washed by washed by centrifugation for 10 minutes at 600×g at room temperature. Monocytes were resuspended in ImmunoCult™-SF Macrophage Medium (StemCell Technologies) containing 100 ng/mL human M-CSF. Monocytes (2.5e5 per well) then were seeded in a 48-well plate with a final volume of 500 μL. Five days later (on day 5), fresh medium with cytokines were added to generate M1 and M2 macrophages. To generate primary human M1 macrophages, 250 μL of ImmunoCult™-SF Macrophage Medium containing 10 ng/mL LPS+50 ng/mL IFNγ was added per well and incubated for 48 hours. To generate primary human M2 macrophages, 250 μL of ImmunoCult™-SF Macrophage Medium containing 150 ng/mL human M-CSF+60 ng/mL human, IL-4+60 ng/mL, and human IL-10 was added per well and incubated for 48 hours.

[1760] On day 7, duplicate wells were infected at an MOI of 10, for two hours in RPMI, with the YS1646Δasd/ΔFLG/ΔpagP/ΔansB/ΔcsgD strain containing a plasmid encoding huIL-15Rα-IL-15sc+huSTING N154S/R284G tazCTT. The cells then were washed 3 times with PBS and resuspended in RPMI+100 μg/mL gentamicin (Sigma). After 48 hours, the cells were either collected for gene expression analysis using qPCR analysis (as previously mentioned) or cell surface protein expression analysis using flow cytometry.

[1761] For qPCR analysis, the cells were collected for RNA isolation using the RNeasy® Plus Mini Kit (Qiagen), according to the manufacturer's instructions. Total RNA concentration was measured using a NanoDrop™ 2000 UV-Vis Spectrophotometer (Thermo Scientific). The purity of each sample also was assessed from the A₂₆₀/A₂₃₀ absorption ratio. Synthesis of cDNA was performed from 0.5-1 μg of template RNA using a CFX96™ Real-Time System (Bio-Rad) and iScript™ Reverse Transcription Supermix for RT-qPCR (Bio-Rad) in a 20 μL reaction, according to the manufacturer's instructions. qPCR was performed with a CFX96 Real-Time System (Bio-Rad). PrimePCR™ Probe Assay for huCD80 (qHsaCIP0026764), huCD86 (qHsaCEP0050792), huCCR7 (qHsaCIP033364), huCD14 (qHsaCEP0053971), huSPP1 (qHsaCED0057074) and huC1QC (qHsaCED0003470) (All from Bio-Rad). The qPCR reaction (20 μL) was conducted per protocol, using either the SsoAdvanced™ Universal SYBR Green Supermix or the iQ Multiplex Powermix (Bio-Rad). The standard thermocycling program on the Bio-Rad CFX96 Real-Time System consisted of a 95° C. denaturation for 150 sec, followed by 39 cycles of 95° C. for 15 sec and 60° C. for 55 sec. Quantification of the target mRNA was normalized using Actin reference mRNA (Bio-Rad, qHsaCEP0036280). ΔC_{q} was calculated as the difference between the target and reference gene.

[1762] For flow cytometry analysis, cells were washed with 500-uL of DPBS and detached by incubating with 10-mM EDTA in PBS on ice for 20-min. Lifted cells were washed once with flow buffer (PBS+2% FBS) and resuspended in 100-uL of LIVE/DEAD Violet Fixable Viability Dye. After 20-min incubation at RT, cells were washed once with flow buffer and resuspended in 50 μL of flow buffer containing True-Stain Monocyte Blocker and Human TruStain FcX. After 10-min incubation on ice, cell surface flow cytometry antibodies CD80 BV605 clone 2D10 (BioLegend) were added. After 20-min of incubation on ice and in the dark, cells were washed twice with flow buffer. Cells then were resuspended in flow buffer and data were acquired using the NovoCyte® flow cytometer (ACEA Biosciences, Inc.) and analyzed using FlowJo™ software (Tree Star, Inc.).

[1763] As shown in the table below, compared to the corresponding untreated M1 or M2 macrophages controls, the YS1646Δasd/ΔFLG/ΔpagP/ΔansB/ΔcsgD strain containing a plasmid encoding huIL-15Rα-IL-15sc+huSTING N154S/R284G tazCTT induced high levels of the M1 macrophage markers CD80, CD86, CCR7 and CD14 on both M1 and M2 macrophages. The M1 macrophages initially had higher expression of C1QC than the M2 macrophages, but infected M2 macrophages showed enhanced expression of SPP1 and C1QC following infection, unlike the M1 macrophages which were not altered. These data demonstrate the ability of the therapy to induce a hybrid SPP1/C1QC phenotype in primary human M2 macrophages.

| | Cell Surface | | | | | | |
|---|---|---|---|---|---|---|---|
| | Expression | | | | | | |
| | (MFI) | Fold Expression Over Reference Gene | | | | | |
| Treatments | CD80 | CD80 | CD86 | CCR7 | CD14 | SPP1 | C1QC |
| M1 Macs | 1.51E+04 | 1.69E−03 | 9.03E−04 | 1.99E−01 | 1.39E−01 | 2.59E−02 | 1.94E−01 |
| Untreated | | | | | | | |
| M2 Macs | 2.36E+04 | 1.75E−02 | 6.44E−02 | 1.00E+00 | 4.93E−01 | 5.63E−03 | 1.58E−01 |
| Untreated | | | | | | | |
| M2 + RpRp | 5.54E+03 | 8.64E−04 | 4.87E−06 | 1.52E−02 | 4.04E−02 | 4.18E−02 | 1.29E−01 |
| M2 + STACT | 1.57E+04 | 5.73E−03 | 3.01E−02 | 5.43E−01 | 2.33E−01 | 4.01E−01 | 2.60E−01 |
| IL-15 + STING | | | | | | | |

[1764] A follow-up study was performed to further characterize the SPP1/C1QC phenotype in primary human M2 macrophages infected with the YS1646Δasd/ΔFLG/ΔpagP/ΔansB/ΔcsgD strain containing a plasmid encoding huIL-15Rα-IL-15sc+huSTING N154S/R284G tazCTT, and to assess whether the M2 macrophages can be converted to a hybrid M1/M2 phenotype with enhanced expression of SPP1, C1QC and the C1QC-induced phagocytosis receptor MERTK.

[1765] Frozen human monocytes, isolated from healthy human donors, were thawed in complete medium (RPMI-1640+10% FBS), and washed by centrifugation for 10 minutes at 600×g at room temperature. Monocytes were resuspended in ImmunoCult™-SF Macrophage Medium (StemCell Technologies) containing 100 ng/mL human M-CSF. Monocytes (2.5e5 per well) then were seeded in a 48-well plate with a final volume of 500 μL. Five days later (on day 5), fresh medium with cytokines were added to generate M1 and M2 macrophages. To generate primary human M1 macrophages, 250 μL of ImmunoCult™-SF Macrophage Medium containing 10 ng/mL LPS+50 ng/mL IFNγ was added per well and incubated for 48 hours. To generate primary human M2 macrophages, 250 μL of ImmunoCult™-SF Macrophage Medium containing 150 ng/mL human M-CSF+60 ng/mL human IL-4+60 ng/mL human IL-10 was added per well and incubated for 48 hours.

[1766] On day 7, duplicate wells were infected at an MOI of 10, for two hours in RPMI, with the YS1646Δasd/ΔFLG/ΔpagP/ΔansB/ΔcsgD strain containing a plasmid encoding huIL-15Rα-IL-15sc+huSTING N154S/R284G tazCTT. The cells then were washed 3 times with PBS and resuspended in RPMI+100 μg/mL gentamicin (Sigma). After 48 hours, the cells were either collected for gene expression analysis using qPCR analysis (as previously mentioned) or cell surface protein expression analysis using flow cytometry.

[1767] For qPCR analysis, the cells were collected for RNA isolation using the RNeasy® Plus Mini Kit (Qiagen), according to the manufacturer's instructions. Total RNA concentration was measured using a NanoDrop™ 2000 UV-Vis Spectrophotometer (Thermo Scientific). The purity of each sample also was assessed from the A₂₆₀/A₂₃₀ absorption ratio. Synthesis of cDNA was performed from 0.5-1 μg of template RNA using a CFX96™ Real-Time System (Bio-Rad) and iScript™ Reverse Transcription Supermix for RT-qPCR (Bio-Rad) in a 20 μL reaction, according to the manufacturer's instructions. qPCR was performed with a CFX96 Real-Time System (Bio-Rad). PrimePCR™ Probe Assay for huSPP1 (qHsaCED0057074), huC1QC (qHsaCED0003470), huMYC (qHsaCIP0028650) and huMERTK (qHsaCIP0031506) (All from Bio-Rad). The qPCR reaction (20 μL) was conducted per protocol, using either the SsoAdvanced Universal SYBR® Green Supermix or the iQ Multiplex Powermix (Bio-Rad). The standard thermocycling program on the Bio-Rad CFX96 Real-Time System consisted of a 95° C. denaturation for 150 sec, followed by 39 cycles of 95° C. for 15 sec and 60° C. for 55 sec. Quantification of the target mRNA was normalized using Actin reference mRNA (Bio-Rad, qHsaCEP0036280). ΔC_{q} was calculated as the difference between the target and reference gene.

[1768] As shown in the table below, compared to the corresponding untreated M2 macrophages controls, the YS1646Δasd/ΔFLG/ΔpagP/ΔansB/ΔcsgD strain containing a plasmid encoding huIL-15Rα-IL-15sc+huSTING N154S/R284G tazCTT induced high levels of SPP1 and C1QC expression on macrophages. The STACT infected M2 macrophages demonstrate enhanced expression of the apoptotic cell phagocytosis receptor MERTK, as well as upregulation of the proliferation gene MYC. These data demonstrate that treatment of M2 macrophages with the immunostimulatory bacterial therapy induces a hybrid SPP1/C1QC phenotype with enhanced phagocytic and proliferative capacity.

| | Fold Expression Over Reference Gene | | | |
|---|---|---|---|---|
| Treatments | MERTK | SPP1 | C1QC | MYC |
| M2 Untreated | 3.20E−03 | 8.05E−02 | 1.85E−01 | 8.5E−03 |
| M2 + | 8.80E−02 | 1.35E+01 | 4.15E−01 | 3.2E−01 |
| YS1646Δasd/ΔFLG/ΔpagP/ΔansB/ΔcsgD | | | | |
| huIL-15Rα-IL-15sc + | | | | |
| huSTING N154S/ | | | | |
| R284G tazCTT | | | | |

### Example 49

### Immunomodulatory Bacterial Strains Containing Plasmids Encoding Human huIL-15Rα-IL-15sc and huSTING N154S/R284G tazCTT Demonstrate Significant T-Cell and NK Cell Recruitment in MC38 Mouse Model of Colorectal Cancer and Significant T-Cell Recruitment in the KP1 Mouse Model of Small Cell Lung Cancer, Activity Which is Correlated to Tumor SPP1/C1QC Expression

[1769] This example characterizes the tumor immunophenotype of murine tumor models IV administered the YS1646Δasd/ΔFLG/ΔpagP/ΔansB/ΔcsgD strain containing a plasmid, such as one encoding huIL-15Rα-IL-15sc+huSTING N154S/R284G tazCTT, and assesses whether the ability to deliver payloads correlates with the SPP1/C1QC phenotypes in these models. For this, 5e5 MC38 Cal syngeneic colorectal tumor cells (a gift from the Immunology Department at UC Berkeley) were subcutaneously implanted in the flank of C57BL/6 mice (The Jackson laboratory) and tumor formation was monitored for 10 days. On day 10 post-implantation, mice were intravenously injected with PBS, 1e7 CFU of YS1646Δasd/ΔFLG/ΔpagP/ΔansB/ΔcsgD containing a control plasmid or 1e7 CFU of YS1646Δasd/ΔFLG/ΔpagP/ΔansB/ΔcsgD containing the plasmid encoding muIL-15Rα-IL-15sc, huSTING N154S/R284G tazCTT or muIL-15Rα-IL-15sc and huSTING N154S/R284G tazCTT. Seven days after treatment with immunomodulatory bacterial strains, tumors were excised from animals and dissociated using Miltenyi Biotec C tubes containing 200 ug/ml Collagenase IV and 20 ug/ml DNase I (Sigma-Aldrich). The resulting tumor single cell suspension was stained using anti-murine CD4-FITC conjugated antibodies, anti-murine CD8-BV650 conjugated antibodies, anti-murine NK1.1 PE conjugated antibodies, Precision Counting Beads (all from Biolegend). In a separate staining, the tumor single cell suspension was stained to assess the expression of PD-1 and PD-L1 on tumor-associated macrophages and tumor cells using anti-murine PD-1 BV785-conjugated antibodies and anti-murine PD-L1-BV650 conjugated antibodies (all from Biolegend). The data was acquired using the ACEA Novocyte flow-cytometer. The absolute number of CD4⁺ and CD8⁺ T-cells as well as the absolute number of NK cells was calculated and normalized to the tumor weight and the mean fluorescence intensity was calculated to monitor PD-1 and PD-L1 expressions.

[1770] As shown in the table below, recruitment and expansion of CD4⁺ and CD8⁺ T-cells, as well as Natural Killer (NK) cells, was observed for the muIL-15Rα-IL-15sc payload alone, and enhanced with the combination of muIL-15Rα-IL-15sc+huSTING N154S/R284G tazCTT payloads. PD-1 and PD-L1 expression was detected in tumor-associated macrophages and was increased upon treatment with YS1646Δasd/ΔFLG/ΔpagP/ΔansB/ΔcsgD containing the plasmid encoding the muIL-15Rα-IL-15sc and huSTING N154S/R284G tazCTT. PD-L1 expression was not substantially detected at the surface of tumor cells and did not significantly increase with treatment.

| | | | | | | | PD-1 Mean | | PD-L1 Mean | | | |
|---|---|---|---|---|---|---|---|---|---|---|---|---|
| | | | | | | | Fluorescence | | Fluorescence | | PD-L1 | |
| | Number of | | Number of | | | | Intensity on | | Intensity on | | Mean | |
| | CD4+ T | | CD8+ T | | Number of | | tumor- | | tumor- | | Fluorescence | |
| | cells per g of | | cells per g of | | NK cells per | | associated | | associated | | Intensity on | |
| | tumor | | tumor | | g of tumor | | Macrophages | | Macrophages | | tumor cells | |
| Treatment | Mean | SEM | Mean | SEM | Mean | SEM | Mean | SEM | Mean | SEM | Mean | SEM |
| PBS | 1541 | 402 | 1281 | 244 | 182 | 61 | 5274 | 384 | 12663 | 688 | 1190 | 256 |
| Bacteria | 6293 | 962 | 3419 | 660 | 219 | 25 | 6111 | 214 | 13906 | 484 | 1385 | 37 |
| containing | | | | | | | | | | | | |
| control | | | | | | | | | | | | |
| plasmid | | | | | | | | | | | | |
| Bacteria with | 13895 | 3196 | 7732 | 3057 | 759 | 214 | 8767 | 544 | 15287 | 805 | 1793 | 354 |
| plasmid | | | | | | | | | | | | |
| encoding | | | | | | | | | | | | |
| muIL-15Rα- | | | | | | | | | | | | |
| IL-15sc | | | | | | | | | | | | |
| Bacteria with | 12265 | 3384 | 4534 | 1568 | 510 | 184 | 7588 | 389 | 14591 | 1268 | 1023 | 152 |
| plasmid | | | | | | | | | | | | |
| encoding | | | | | | | | | | | | |
| huSTING | | | | | | | | | | | | |
| N154S/R284G | | | | | | | | | | | | |
| tazCTT | | | | | | | | | | | | |
| Bacteria with | 15946 | 3430 | 9431 | 1776 | 772 | 122 | 7616 | 181 | 15959 | 707 | 1493 | 200 |
| plasmid | | | | | | | | | | | | |
| encoding | | | | | | | | | | | | |
| muIL-15Rα- | | | | | | | | | | | | |
| IL-15sc + | | | | | | | | | | | | |
| huSTING | | | | | | | | | | | | |
| N154S/R284G | | | | | | | | | | | | |
| tazCTT | | | | | | | | | | | | |

[1771] A similar experiment was performed in the KP1 mouse model of immune desert small-cell lung cancer (SCLC). For this, KP1 cells (a gift from the Sage lab at Stanford) were sub-cutaneously implanted in the flank of B6129SF1/J mice (The Jackson laboratory) and tumor formation was monitored for 10 days. On day 10 post-implantation, mice were intravenously injected with PBS or 1e7 CFU of YS1646Δasd/ΔFLG/ΔpagP/ΔansB/ΔcsgD containing the plasmid encoding huIL-15Rα-IL-15sc and huSTING N154S/R284G tazCTT. Twelve days after treatment with immunomodulatory bacterial strains, tumors were excised from animals and dissociated using Miltenyi Biotec C tubes containing 2000 ug/ml Collagenase IV and 20 ug/ml DNase I (Sigma-Aldrich). The resulting tumor single cell suspension was stained using anti-murine CD4-FITC conjugated antibodies, anti-murine CD8-BV650 conjugated antibodies, Precision Counting Beads (all from Biolegend) and the data was acquired using the ACEA Novocyte flow-cytometer. The absolute number of CD4⁺ and CD8⁺ T cells was calculated and normalized to the tumor weight.

[1772] The immunostimulatory bacteria encoding huIL-15Rα-IL-15sc and huSTING N154S/R284G tazCTT induced a significant recruitment of CD4⁺ and CD8⁺ T in the tumor microenvironment as compared to the PBS-treated group. While no tumor regressions were observed, likely due to the lack of tumor antigens in this immune desert model, it demonstrated the on-target ability of YS1646Δasd/ΔFLG/ΔpagP/ΔansB/ΔcsgD containing the plasmid encoding the huIL-15Rα-IL-15sc and huSTING N154S/R284G tazCTT immunomodulatory payloads to deliver type I IFN and huIL-15Rα-IL-15sc to recruit and expand T-cells in these tumors.

| | Number of CD4+ | | Number of CD8+ | |
|---|---|---|---|---|
| | T cells per g of tumor | | T cells per g of tumor | |
| Treatment | Mean | SEM | Mean | SEM |
| PBS | 3309 | 854 | 2364 | 1113 |
| Bacteria with | 27164 | 12229 | 19843 | 6589 |
| huIL-15Rα-IL-15sc + | | | | |
| huSTING N154S/R284G | | | | |
| tazCTT | | | | |

[1773] Next an experiment was performed with the tumors from the above MC38 Cal and KP1 tumor models, in which the immunostimulatory bacteria were efficacious, and compared to tumors previously isolated from a MC38 (Kerafast) tumor model that did not demonstrate T-cell infiltration or anti-tumor efficacy, in order to determine whether tumor SPP1/C1QC status may be correlated to in vivo payload delivery.

[1774] On day 7 post-IV injection, tumors were excised and processed for RNA extraction using the GentleMACS™ Octo Dissociator and the C tubes (Miltenyi Biotec) molecule setting in 2 mL of PBS. The homogenates were spun down at 1300 RPM for 10 minutes, and single cells suspension was collected for RNA isolation using the RNeasy® Plus Mini Kit (Qiagen), according to the manufacturer's instructions. Total RNA concentration was measured using a NanoDrop™ 2000 UV-Vis Spectrophotometer (Thermo Scientific). Previously stored RNA from the MC38 Kerafast model was also used. The purity of each sample also was assessed from the A₂₆₀/A₂₃₀ absorption ratio. Synthesis of cDNA was performed from 0.5-1 μg of template RNA using a CFX96™ Real-Time System (Bio-Rad) and iScript™ Reverse Transcription Supermix for RT-qPCR (Bio-Rad) in a 20 μL reaction, according to the manufacturer's instructions. qPCR was performed with a CFX96 Real-Time System (Bio-Rad). Custom qPCR primers were used for eSTING detection. PrimePCR™ Probe Assay for muSpp1 (qMmuCEP0062824), muC1qc (qMmuCEP0057437) were purchased from Bio-Rad. The qPCR reaction (20 μL) was conducted per protocol, using either the SsoAdvanced Universal SYBR® Green Supermix or the iQ Multiplex Powermix (Bio-Rad). The standard thermocycling program on the Bio-Rad CFX96 Real-Time System consisted of a 95° C. denaturation for 150 sec, followed by 39 cycles of 95° C. for 15 sec and 60° C. for 55 sec. Quantification of the target mRNA was normalized using Actin reference mRNA (Bio-Rad, qHsaCEP0036280). ΔC_{q} was calculated as the difference between the target and reference gene.

[1775] The values are shown in the table below as the average of four mice. Compared to the PBS control group, YS1646Δasd/ΔFLG/ΔpagP/ΔansB/ΔcsgD strains containing the plasmid encoding the huIL-15Rα-IL-15sc and huSTING N154S/R284G tazCTT induced high levels of huSTING N154S/R284G tazCTT expression in KP1 and MC38 Cal tumors, but not in the tumors from the MC38 Kerafast model. PBS-treated tumors from the three models were assessed in order to determine whether Spp1/C1qc status may be predictive of payload delivery and efficacy. As shown below, PBS-treated tumors from the MC38 Kerafast model expressed high levels of Spp1 and low levels of C1qc, whereas for the other two models it was the opposite. These data imply that a high Spp1/C1qC ratio in a colorectal tumor model may negatively impact the ability to deliver plasmids.

| | | | | SPP1/ |
|---|---|---|---|---|
| | Fold Expression Relative to Actin | | | C1QC |
| Tumors | eSTING | SPP1 | C1QC | ratio |
| KP1 + PBS | 1.35E−03 | 5.79E−02 | 2.31E−01 | 5.51E−01 |
| KP1 + YS1646^{Δasd/ΔFLG/ΔpagP/ΔansB/ΔcsgD} + | 2.80E−01 | | | |
| huIL-15 + eSTING | | | | |
| MC38 Cal + PBS | 7.85E−04 | 3.60E−01 | 3.85E−01 | 1.88E+00 |
| MC38 Cal + YS1646^{Δasd/ΔFLG/ΔpagP/ΔansB/ΔcsgD} + | 2.31E−01 | | | |
| muIL-15 + eSTING | | | | |
| MC38 Kerafast + PBS | 3.77E−04 | 7.24E+00 | 3.00E−02 | 1.44E+02 |
| MC38 Kerafast + | 5.24E−04 | | | |
| YS1646^{Δasd/ΔFLG/ΔpagP/ΔansB/ΔcsgD} + | | | | |
| muIL-12 + eSTING | | | | |

### Example 50

### Immunostimulatory Bacteria encoding IL-15Rα-IL15sc+huSTING N154S/R284G tazCTT Demonstrates Potent Payload Delivery in Orthotopic EMT6 Tumors and Immune Correlates of Efficacy

[1776] A study was performed to evaluate the in vivo immune correlates of potency in an orthotopic, T-cell excluded, and metastatic model of CPI (immune checkpoint inhibitor) refractory triple-negative breast cancer. For this experiment, 6-8 week-old female BALB/c mice (10 mice per group for TGI, 5 mice per group for immune correlates) were inoculated in the left mammary fat pad with EMT6 tumor cells (ATCC® CRL-2755™) (1×10⁶ cells in 100 μL PBS). Mice bearing 7 day-old established mammary tumors (˜65 mm³ in volume) were intravenously (IV) injected with a single dose of 3×10⁷ CFUs of YS1646Δasd/ΔFLG/ΔpagP/ΔansB/ΔcsgD strains contained plasmids encoding muIL-15Rα-IL15sc+huSTING N154S/R284G tazCTT, or huIL-15Rα-IL15sc+huSTING N154S/R284G tazCTT and were compared to treatment with PBS control.

[1777] The tumors in the PBS-treated mice grew evenly, reaching a max tumor volume at day 31. Mice that were IV treated with either the bacterial strain containing a plasmid encoding muIL-15Rα-IL15sc+huSTING N154S/R284G tazCTT or with huIL-15Rα-IL15sc+huSTING N154S/R284G tazCTT, both achieved a 70% complete response rate. The therapeutic payload combinations were very well tolerated, and mice did not lose weight during the study. These data demonstrate the in vivo potency of IV administered immunostimulatory bacteria encoding the combinations of muIL-15Rα-IL15sc+huSTING N154S/R284G tazCTT, and huIL-15Rα-IL15sc+huSTING N154S/R284G tazCTT in an orthotopic, T-cell excluded, metastatic model of checkpoint inhibitor refractory triple-negative breast cancer (TNBC).

[1778] In the separately treated cohort (N=5), mice were harvested at D7 in order to interrogate tumor immune correlates of potency. In the group treated with huIL-15Rα-IL-15sc+huSTING N154S/R284G tazCTT, 3 out of 5 mice had already cured out and only 2 mice remained for analysis. All 5 tumors, while small, remained for analysis in the muIL-15Rα-IL-15sc+huSTING N154S/R284G tazCTT group. On day 7 post-IV injection, tumors were assessed for expression of muIL-15Rα-IL-15sc or huIL-15Rα-IL-15sc and huSTING N154S/R284G tazCTT, relative to PBS control. Excised tumors were processed for RNA extraction using the GentleMACS™ Octo Dissociator and the C tubes (Miltenyi Biotec) molecule setting in 2 mL of PBS. The homogenates were spun down at 1300 RPM for 10 minutes, and single cells suspension was collected for RNA isolation using the RNeasy® Plus Mini Kit (Qiagen), according to the manufacturer's instructions. Total RNA concentration was measured using a NanoDrop™ 2000 UV-Vis Spectrophotometer (Thermo Scientific). The purity of each sample also was assessed from the A₂₆₀/A₂₃₀ absorption ratio. Synthesis of cDNA was performed from 0.5-1 μg of template RNA using a CFX96™ Real-Time System (Bio-Rad) and iScript™ Reverse Transcription Supermix for RT-qPCR (Bio-Rad) in a 20 μL reaction, according to the manufacturer's instructions. qPCR was performed with a CFX96 Real-Time System (Bio-Rad). Custom qPCR primers were used for eSTING and IL-15 detection. PrimePCR™ Probe Assay for muIfnα2 (qMmuCEP0043629), muIfnβ1 (qMmuCEP0058870), muCxcl10 (qMmuCEP0057926) and mu4-1bbl (qMmuCED0004214), muSpp1 (qMmuCEP0062824), muC1qc (qMmuCEP0057437) were purchased from Bio-Rad. The qPCR reaction (20 μL) was conducted per protocol, using either the SsoAdvanced Universal SYBR® Green Supermix or the iQ Multiplex Powermix (Bio-Rad). The standard thermocycling program on the Bio-Rad CFX96 Real-Time System consisted of a 95° C. denaturation for 150 sec, followed by 39 cycles of 95° C. for 15 sec and 60° C. for 55 sec. Quantification of the target mRNA was normalized using Actin reference mRNA (Bio-Rad, qHsaCEP0036280). ΔΔC_{q} was calculated as the difference between the treatments and the uninfected control.

[1779] The values are shown in the table below as the average of 5 mice for the muIL-15Rα-IL-15sc+huSTING N154S/R284G tazCTT group, and 2 mice for huIL-15Rα-IL-15sc+huSTING N154S/R284G tazCTT group, relative to an average of 5 mice in the PBS control group. Compared to the PBS control group, both tumor groups treated with the strains containing muIL-15Rα-IL-15sc or huIL-15Rα-IL-15sc+huSTING N154S/R284G tazCTT induced high levels of expression in tumors of their respective payloads, as compared to PBS. Both treatment groups induced high levels of payload-dependent Ifnα2, Ifnβ1, Cxcl10, and the costimulatory receptor 4-1bbl. In this model, the PBS group had a mixed Spp1/C1qc phenotype, with higher expression of Spp1 relative to C1qc. Both treatment groups induced C1QC expression, and to a higher degree in the huIL-15Rα-IL-15sc+huSTING N154S/R284G tazCTT treatment group, and both demonstrated reduced SPP1 expression relative to the PBS group.

[1780] These data describe the tumor genetic signatures of potency for strains delivering huIL-15Rα-IL-15sc+huSTING N154S/R284G tazCTT payloads, as well as an immune correlate in breast cancer models that upregulation of C1QC, and downregulation of SPP1 in tumor-resident macrophages may be an indicator of potency and payload delivery.

| | Fold Expression Relative to PBS group | | | | | | | |
|---|---|---|---|---|---|---|---|---|
| Treatments | eSTING | IL-15 | IFNα2 | IFNβ1 | CXCL10 | 4-1BBL | SPP1 | C1QC |
| YS1646Δasd/ΔFLG/ | 9.66E+02 | 5.47E+01 | 1.71E+01 | 1.22E+01 | 1.28E+01 | 4.98E+00 | 3.62E−01 | 2.90E+00 |
| ΔpagP/ΔansB/ΔcsgD + | | | | | | | | |
| muIL-15Rα-IL- | | | | | | | | |
| 15sc + huSTING | | | | | | | | |
| N154S/R284G | | | | | | | | |
| tazCTT | | | | | | | | |
| YS1646Δaasd/ΔFLG/ | 2.39E+02 | 1.75E+02 | 3.05E+01 | 2.17E+01 | 2.70E+01 | 6.62E+00 | 4.11E−01 | 2.77E+00 |
| ΔpagP/ΔansB/ΔcsgD + | | | | | | | | |
| muIL-15Rα-IL- | | | | | | | | |
| 15sc + huSTING | | | | | | | | |
| N154S/R284G | | | | | | | | |
| tazCTT | | | | | | | | |

### Example 51

### Immunomodulatory Bacterial Strains, Containing Plasmids Encoding Human IL-15Rα-IL-15sc and huSTING N154S/R284G tazCTT Demonstrate In Vivo Payload Delivery, T-Cell Recruitment and Efficacy, Correlating with High Tumor Proliferating Macrophages

[1781] The goal of this experiment is to demonstrate optimal tumor immunophenotype for treatment with the YS1646Δasd/ΔFLG/ΔpagP/ΔansB/ΔcsgD strain containing the plasmid encoding huIL-15Rα-IL-15sc and huSTING N154S/R284G tazCTT to induce payload delivery and anti-tumor immunity in syngeneic tumor mouse models.

[1782] The MC38 model (colorectal), EMT6 model (breast), CT26 (colon) and 4T1 (breast) models of cancer were used in this example. MC38 and CT26 cells were sub-cutaneously implanted in the flank of C57BL6 and Balb/c mice (The Jackson laboratory) respectively, and tumor formation was monitored for 10 days. 4T1 and EMT-6 cells were orthotopically implanted in the mammary pad of Balb/c mice and tumor formation was monitored for 10 days.

[1783] On day 10 post-implantation (day 0), tumors were excised from animals prior to treatment and dissociated using Miltenyi Biotec C tubes containing 200 ug/ml Collagenase IV and 20 ug/ml DNase I (Sigma-Aldrich). The resulting tumor single cell suspension was stained using anti-murine CD8-BV650, anti-murine F4/80 APC, anti-murine Ki67 BV421 conjugated antibodies and Precision Counting Beads (all from Biolegend). Mice were treated with PBS or YS1646Δasd/ΔFLG/ΔpagP/ΔansB/ΔcsgD strain containing the plasmid encoding either Nano-luciferase (used as a control strain) or huIL-15Rα-IL-15sc+huSTING N154S/R284G tazCTT. Seven days after treatment with immunomodulatory bacterial strains, the tumors were dissociated as described earlier and single cell suspensions were stained using anti-murine CD8-BV650 conjugated antibodies and Precision Counting Beads (all from Biolegend). The data was acquired using the ACEA Novocyte flow-cytometer. The absolute number of CD8+ T cells at day 0 and day 7 as well as the absolute number of tumor-associated Ki67+ proliferating macrophages at day 0 was calculated and normalized to the tumor weight for every syngeneic models.

[1784] The level of tumor Mertk, Spp1 and C1qc expression was assessed to compare the tumor-specific gene signature in various tumor types. On day 0 prior to IV injection, tumors were excised and processed for RNA extraction using the GentleMACS™ Octo Dissociator and the C tubes (Miltenyi Biotec) molecule setting in 2 mL of PBS. The homogenates were spun down at 1300 RPM for 10 minutes, and single cells suspension was collected for RNA isolation using the RNeasy® Plus Mini Kit (Qiagen), according to the manufacturer's instructions. Total RNA concentration was measured using a NanoDrop™ 2000 UV-Vis Spectrophotometer (Thermo Scientific). The purity of each sample also was assessed from the A₂₆₀/A₂₃₀ absorption ratio. Synthesis of cDNA was performed from 0.5-1 μg of template RNA using a CFX96™ Real-Time System (Bio-Rad) and iScript™ Reverse Transcription Supermix for RT-qPCR (Bio-Rad) in a 20 μL reaction, according to the manufacturer's instructions. qPCR was performed with a CFX96 Real-Time System (Bio-Rad). Custom qPCR primers were used for eSTING detection. PrimePCR™ Probe Assay for muMertk (qMmuCEP0052884), muSpp1 (qMmuCEP0062824) and muC1qc (qMmuCEP0057437) were purchased from Bio-Rad. The qPCR reaction (20 μL) was conducted per protocol, using either the SsoAdvanced Universal SYBR® Green Supermix or the iQ Multiplex Powermix (Bio-Rad). The standard thermocycling program on the Bio-Rad CFX96 Real-Time System consisted of a 95° C. denaturation for 150 sec, followed by 39 cycles of 95° C. for 15 sec and 60° C. for 55 sec. Quantification of the target mRNA was normalized using Actin reference mRNA (Bio-Rad, qHsaCEP0036280). ΔC_{q} was calculated as the difference between the target and reference gene.

[1785] As shown in the tables below, strong anti-tumor activity after treatment with immunomodulatory bacterial strains was observed for the syngeneic models that were highly enriched for proliferating tumor-associated macrophages (MC38 and EMT6). Tumor growth inhibition was not observed in the syngeneic models containing low levels of proliferating tumor-associated macrophages (4T1 and CT26). Similarly, increases in CD8⁺ T cell recruitment also correlated with proliferating macrophages, and were highest in the MC38 model, followed by the EMT6 model. For the tumor qPCR measuring Spp1 and C1qc, the 4T1 and CT26 models had expression of Spp1 and of C1qc at similar levels, whereas EMT6 had lower expression of both. MC38 had the highest C1qc, very low Spp1, and was the only model that demonstrated expression of Mertk. When comparing the ratio of Spp1 to C1qc to the tumor efficacy, the highest ratios correlate with the lowest efficacy.

[1786] These data demonstrate that tumor composition prior to dosing can be predictive of payload delivery and anti-tumor efficacy. The higher the amount of proliferating macrophages, as well as the lower the Spp1 to C1qc ratio, the more payload delivery will occur and result in type I IFN-mediated CD83 T cell recruitment and anti-tumor immunity upon treatment with STACT-encoding huIL-15Rα-IL-15sc+huSTING N154S/R284G tazCTT.

| | Number of proliferating | | % Tumor | |
|---|---|---|---|---|
| | macrophages per g of tumor | | regression from | |
| Tumor | prior to treatment (day 0) | | baseline | |
| model | Mean | SEM | Mean | SEM |
| MC38 | 16453 | 3642 | −51.62 | 13.2 |
| EMT6 | 9595 | 2254 | −28.51 | 18.6 |
| CT26 | 4369 | 755.3 | 114.3 | 71.6 |
| 4T1 | 4287 | 1043 | 11.64 | 13.7 |

| | Number of CD8+ T cells per g of tumor | | | | | | | |
|---|---|---|---|---|---|---|---|---|
| | MC38 Model | | EMT6 Model | | 4T1 Model | | CT26 Model | |
| Treatment | Mean | SEM | Mean | SEM | Mean | SEM | Mean | SEM |
| Day 0 - Before treatment | 1830 | 288 | 99 | 13 | 542 | 204 | 403 | 105 |
| Day 7 - PBS treatment | 1313 | 470 | 445 | 112 | 140 | 33 | 458 | 133 |
| Day 7 - Treatment with | 1687 | 853 | 223 | 138 | 232 | 46 | 391 | 81 |
| bacteria containing control | | | | | | | | |
| plasmid | | | | | | | | |
| Day 7 - Treatment with | 3284 | 1643 | 682 | 322 | 184 | 41 | 733 | 133 |
| bacteria with plasmid | | | | | | | | |
| encoding huIL-15Rα-IL- | | | | | | | | |
| 15sc + huSTING | | | | | | | | |
| N154S/R284G tazCTT | | | | | | | | |

| | Tumor | Fold Expression Relative to Actin | | | SPP1/C1QC |
|---|---|---|---|---|---|
| Tumors | Growth (%) | SPP1 | C1QC | MERTK | ratio |
| MC38 | −51.6 | 8.08E−02 | 2.16E−01 | 1.72E−02 | 3.78E−01 |
| EMT6 | −28.5 | 2.28E−01 | 1.02E−01 | 6.60E−07 | 2.36E+00 |
| 4T1 | 11.6 | 6.40E−01 | 1.84E−01 | 1.89E−06 | 3.56E+00 |
| CT26 | 114.3 | 4.70E−01 | 1.24E−01 | 1.10E−07 | 5.09E+00 |

### Example 52

### Immunomodulatory Bacterial Strains, Containing Plasmids Encoding Human IL-15Rα-IL-15sc and huSTING N154S/R284G tazCTT Demonstrates Significant T-Cell Recruitment in a Spontaneous Autochthonous Mouse Model of Breast Cancer

[1787] The spontaneous model of breast cancer, MMTV-PyMT, was employed to further illustrate the on-target potency and immune correlates of the YS1646Δasd/ΔFLG/ΔpagP/ΔansB/ΔcsgD strain containing a plasmid encoding huIL-15Rα-IL-15sc+huSTING N154S/R284G tazCTT in a spontaneous and immune desert model of breast cancer. In this model, females develop palpable mammary tumors with near 100% penetrance due to the expression of the Polyoma Virus middle T antigen under the direction of the mouse mammary tumor virus promoter/enhancer.

[1788] For this study, mice were IV injected with 3×10⁷ CFUs of the bacterial strain or PBS control when their largest tumors measured an average of 272 mm³ in volume (between day 79 to 96 post-acquisition of the mice). Tumors were collected between days 85 to 121 post-acquisition of the mice. For bacterial enumeration, Tumors were homogenized Miltenyi Biotec M tubes and plated on LB plates to enumerate the number of CFUs per gram of tumor tissue. All tumors collected were found to be well colonized despite a range of tumor weights (0.05 g to 0.36 g, N=7), with a mean of 2.89×10⁶ CFUs/g. These data demonstrate comparable tumor colonization of spontaneous MMTV-PyMT across all tumors tested.

[1789] For flow cytometry, tumors were dissociated using Miltenyi Biotec C tubes containing 200 ug/ml Collagenase IV and 20 ug/ml DNase I (Sigma-Aldrich). The resulting tumor single cell suspensions were stained using anti-murine CD4-FITC conjugated antibodies, anti-murine CD8-BV650 conjugated antibodies, anti-murine F4/80 APC, anti-murine Ki67 BV421 (all from Biolegend) and the data was acquired using the ACEA Novocyte flow-cytometer. The absolute number of CD4⁺ T cells and CD8⁺ T cells as well as the total amount of tumor-associated macrophages and the sub-population of proliferating macrophages was calculated. This Example describes the impact of the delivery of various immunomodulatory payload by the immunostimulatory bacteria in mammary tumors. The immunostimulatory bacteria encoding huIL-15Rα-IL-15sc+huSTING N154S/R284G tazCTT induce a significant recruitment of CD4⁺ and CD8⁺ T in the tumor microenvironment as compared to the PBS-treated group. The immunostimulatory bacteria encoding huIL-15Rα-IL-15sc+huSTING N154S/R284G tazCTT also increases the number of proliferating macrophages and a positive correlation between the amount of proliferating tumor-associated macrophages and the CD8⁺ T cells was observed for the groups treated with the immunostimulatory bacteria encoding huIL-15Rα-IL-15sc+huSTING N154S/R284G tazCTT (p=0.0007; R=0.6674).

[1790] For tumor qPCR analysis, a piece each tumor was excised and processed for RNA extraction using the GentleMACS™ Octo Dissociator and the C tubes (Miltenyi Biotec) molecule setting in 2 mL of PBS. The homogenates were spun down at 1300 RPM for 10 minutes, and single cells suspension was collected for RNA isolation using the RNeasy® Plus Mini Kit (Qiagen), according to the manufacturer's instructions. Total RNA concentration was measured using a NanoDrop™ 2000 UV-Vis Spectrophotometer (Thermo Scientific). The purity of each sample also was assessed from the A₂₆₀/A₂₃₀ absorption ratio. Synthesis of cDNA was performed from 0.5-1 μg of template RNA using a CFX96™ Real-Time System (Bio-Rad) and iScript™ Reverse Transcription Supermix for RT-qPCR (Bio-Rad) in a 20 μL reaction, according to the manufacturer's instructions. qPCR was performed with a CFX96 Real-Time System (Bio-Rad). Custom qPCR primers were used for eSTING detection. PrimePCR™ Probe Assay for muSpp1 (qMmuCEP0062824), muC1qc (qMmuCEP0057437), muMertk (qMmuCEP0052884), and muCxcl10 (qMmuCEP0057926) were purchased from Bio-Rad. The qPCR reaction (20 μL) was conducted per protocol, using either the SsoAdvanced Universal SYBR® Green Supermix or the iQ Multiplex Powermix (Bio-Rad). The standard thermocycling program on the Bio-Rad CFX96 Real-Time System consisted of a 95° C. denaturation for 150 sec, followed by 39 cycles of 95° C. for 15 sec and 60° C. for 55 sec. Quantification of the target mRNA was normalized using Actin reference mRNA (Bio-Rad, qHsaCEP0036280). ΔC_{q} was calculated as the difference between the target and reference gene.

[1791] As shown in the table below, the MMTV-PyMT tumors are SPP1^{hi}, similar to previous breast cancer models, and treatment with YS1646Δasd/ΔFLG/ΔpagP/ΔansB/ΔcsgD strain containing the plasmid encoding huIL-15Rα-IL-15sc+huSTING N154S/R284G tazCTT induced higher C1qc and lower Spp1 compared to PBS. Further, upregulation of CXCL10 and the phagocytic receptor Mertk are also on target as evidence of successful induction of type I IFN.

| | Fold Expression Relative to Actin | | | | |
|---|---|---|---|---|---|
| | | | | Ratio | |
| Treatments | CXCL10 | SPP1 | C1QC | SPP1/C1QC | MERTK |
| PBS | 2.2E−03 | 7.9E−01 | 6.1E−03 | 7.72E−03 | 8.2E−04 |
| YS1646^{Δasd/ΔFLG/ΔpagP/ΔansB/ΔcsgD} + | 3.0E−02 | 5.6−01 | 1.3E−01 | 2.32E−01 | 3E−03 |
| huIL-15 + eSTING | | | | | |

[1792] These data further demonstrate the mechanism of action of the YS1646Δasd/ΔFLG/ΔpagP/ΔansB/ΔcsgD strain containing the plasmid encoding huIL-15Rα-IL-15sc+huSTING N154S/R284G tazCTT, whereby immune desert tumors with high proliferating macrophage content are well colonized by the bacteria and deliver type I IFN-inducing payloads that promote T-cell recruitment, increases in proliferating macrophages, type I IFN induced Cxcl10, as well as increased C1qc and Mertk, and decreased Spp1.

### Example 53

### Prospective Biomarkers for Identifying Patients Enriched in Proliferating Macrophages

[1793] The presence of proliferating macrophages in solid tumors has been previously described. Biopsies from breast cancer patients at two separate hospitals, UCSF and University of Chicago, were assessed for tumor grade and estrogen receptor (ER), progesterone receptor (PR), or HER2/Erbb2 receptor status. Biopsies were assessed by immunohistochemistry (IHC) for the number of CD68⁺ macrophages that also stained for the proliferation marker Proliferating Cell Nuclear Antigen (PCNA). Results between the two hospitals were compared, and both found that CD68⁺ PCNA⁺ proliferating macrophages were more abundant in ER/PR negative luminal breast cancer, and basal, triple negative breast cancer (TNBC). Further, proliferating macrophages increased with increasing tumor stage (Campbell et al, (2016) Breast Cancer Res Treat 155:431-440). Interestingly, the authors summarized their findings, yet did not express any theories as to why proliferating macrophages, as opposed to other immunosuppressive TAM phenotypes, may be responsible for the more aggressive breast cancer progression.

[1794] In summary, performing routine IHC on patient biopsies and staining for CD68⁺ and PCNA⁺, or the common proliferation marker Ki67⁺, is a prospective biomarker for tumors across histologies that are likely to respond favorably to immunostimulatory bacterial therapies bearing DNA plasmids, and other therapies delivering DNA to immune cells of the tumor microenvironment.

[1795] Beyond IHC biomarkers, assessing biopsies for expression of genes associated with proliferating macrophages also can identify subjects with cancers amenable to delivery of gene therapy to proliferating immune cells. In order to determine common biomarkers across tumor histologies, TCGA databases and published scRNA-seq datasets using 10× and smart-seq technologies were analyzed across solid tumor types. To assess the quantity of proliferating macrophages across histologies, an analysis was performed on tumor types using published scRNA-seq datasets using 10× and smart-seq technologies. Proliferating macrophages were assessed using the G2/M score, which is a set of genes involved in the transition from G2 to M phase of cell cycle, with the distribution defined using the CellCycleScoring function and the Seurat object (Zillionis et al., (2019) Immunity 50(5):1317-1334). Cells defined as proliferating had a G2M score ≥14. The proportions are depicted in the bar graph as percentages (0.05=5%) and calculated using proportion of CD68⁺ cells of total CD45⁺ cells, and proportion of G2/M score⁺ of total CD68⁺ macrophages from tumor tissue samples of all patients in each dataset (see FIGS. 23A and B).

[1796] Proliferating macrophages were highest overall in the datasets acquired from lung, prostate, and colon cancer. Kidney clear cell cancer has high macrophages, but lowest proliferating macrophages (Obradovic et al., (2021) Cell 184(11):2988-3005). HBV⁺ Liver cancer has a moderate amount of proliferating macrophages (Zhang et al., (2019) Cell 179(4):829-845). Head and neck cancer (HNSCC) has the fewest macrophages, likely due to the high TMB from carcinogen or HPV exposure, but of these there are proliferating macrophages (Cillo et al, (2020) Immunity 52(1):183-199). Breast cancer has high proliferating macrophages, and these are increased post treatment proportionally with increased macrophages, and also increased following anti-PD-1 (pembrolizumab) therapy (Bassez et al., (2021) Nat Med 27(5):820-832). Prostate cancer is high overall in proliferating macrophages (Chen et al., (2021) Nat Cell Biol 23(1):87-98). Colon cancer also has high proliferating macrophages, and even more in the CMS1 and CMS4 subtypes (Zhang et al., (2020) Cell 181:442-59; Lee et al., (2020) Nat Genetics 52(6):594-603). Lung cancer (NSCLC) has the highest amount of proliferating macrophages (Zillionis et al., (2019) Immunity 50(5):1317-1334). Thus, across solid tumor types, proliferating macrophages can be identified by gene analysis of CD68 and the G2/M gene module. Proportion of macrophages across all datasets is set forth in FIGS. 23A and B.

[1797] As apoptotic tumor cells are known to recruit macrophages and efferocytosis of these cells enhances macrophage proliferation (Mortimer et al., (1999) Gene Therapy 6:403-411; Elliott et al., (2009) Nature 461(7261):282-6), a bioinformatics study was performed to assess the association of an apoptosis gene module with solid tumor types, and with the stratification of colon and rectal cancer into their CMS subtypes. For this analysis, box and whisker plots were generated from the apoptosis module expression data from TCGA (161 genes associated with apoptosis), compared to cancer types and ordered by median expression. Boxes represent median f interquartile range and whiskers ±1.5× interquartile range. Outliers are represented by black dots. The results are set forth in FIG. 24.

[1798] The apoptosis module was highly associated with tumor types previously established as having high macrophage content, such as the colon CMS4 and CMS1 subtypes, lung cancer (LUAD, LUSC), and breast cancer. Other potential tumor types identified from this analysis may also predict tumors high in proliferating macrophages, such as mesothelioma, pancreatic cancer, and gastric cancer (STAD). Interestingly, HPV-driven cancers such as head and neck (HNSC) and cervical cancer (CESC) also scored high in the apoptosis module, and the spread in the data may indicate the difference between HPV⁺ vs. HPV⁻ cancers.

[1799] Individual patients can be responsive to the immunostimulatory bacteria provided herein, despite having a less favorable histology overall, and can be identified using other gene expression markers. A broad set of gene expression markers associated with proliferation were assessed from all macrophages in the tumor tissue, compiled from the previous list of RNASeq and 10× genomics datasets from the publications above including SPP1, C1QC and the G2M score, and individual genes from the G2M score set. Analyses were performed on lung, breast and colon (no CMC subtyping) datasets from the publications used in the proliferating macrophage analysis above (Zillionis et al., (2019) Immunity 50(5):1317-1334; Bassez et al., (2021) Nat Med 27(5):820-832; Zhang et al., (2020) Cell 181:442-59).

[1800] As shown in FIGS. 25A-F, proliferating macrophages from different histologies had varying associations with SPP1 or C1QC. For example, in the Zillionis NSCLC lung cancer paper, a subset of proliferating macrophages was identified using the G2M module. Further analysis of the macrophage subtypes revealed that the proliferating macrophage subtype identified in the paper (tMacCycl), had higher SPP1 expression than C1QC and scored very high for the microtubule destabilizer gene stathmin1 (STMN1). Conversely, pre-treatment biopsies from breast cancer patients were a hybrid of SPP1 and C1QC, while the colon dataset (not stratified into CMS subtypes) revealed that proliferating macrophages were almost entirely C1QC+. Thus, stratification of patients using tumor expression of SPP1 or C1QC and the G2M score may reveal SPP1⁺ or C1QC⁺ proliferating macrophages in a histology-specific manner. While SPP1 may be predictive for proliferating macrophages in lung cancer and C1QC for colon cancer, other histologies such as breast may be more nuanced.

[1801] Across all the histologies analyzed, the two markers most associated with proliferating macrophages were found to be the G2/M score and STMN1. Shown in the box plots in FIGS. 25A-F are these results for the lung, breast and colon data sets, demonstrating that G2/M score and STMN1 are highly predictive of proliferating macrophages. The results are set forth in FIGS. 25A-F.

[1802] The correlation between SPP1 and C1QC to somatic genetic tumor mutations was assessed, in order to further identify patients in different histologies who would be selected as responsive to the therapy. For this, association plots were constructed that tested the association of SPP1 expression with alterations (single nucleotide variants, indels, copy number changes, fusions/rearrangements) in the major cancer pathways (Supplementary table 4, Sanchez-Vega et al., (2018) Cell 173(2):321-337) in TCGA. The y-axis represents the −log 10(p-value), with the higher the dot the lower the p-value. The different dots represents different tumor types. The association was tested using logistic regression. Only tumor types and mutation/pathway combinations with >15 samples in both wild-type and altered were tested. Association with genetic mutations can identify patients, who will respond to treatment, where expression of SPP1 or C1QC was weakly associated with proliferating macrophages and expression in tumor vs. healthy tissue, but the range for the association was very broad.

[1803] As shown in the SPP1 association plot in FIG. 26, NRF2 pathway alterations were associated with SPP1 expression in squamous carcinomas such as lung (LUSC), head and neck (HNSC), and cervical (CESC), as well as esophageal (ESCA), bladder (BLCA), and kidney renal papillary (KIRP). TP53 mutations in breast cancer (BRCA) and SPP1 were strongly associated. SPP1 and PI3K mutations were identified in prostate cancer (PRAD), and BRAF mutations in skin cutaneous melanoma (SKCM). For the C1QC association plot in FIG. 27, mutations in the HIPPO pathway were associated with C1QC⁺ proliferating macrophages in uterine corpus endometrial cancer (UCEC), and KMT2A mutations in bladder cancer (BLCA). Interestingly, TP53 pathway mutations were also strongly associated with C1QC in breast cancer (BRCA). This further supports the finding from the box plot analysis above, that proliferating macrophages in breast cancer may be associated with hybrid SPP1⁺ C1QC⁺, and TP53 pathway mutations and could be an excellent prognostic biomarker. These results are set forth in FIGS. 26 and 27.

[1804] In summary, while the correlation of SPP1 and C1QC with proliferating macrophages can be different between and among histologies, determining the histologies that are high in proliferating macrophages can be accomplished by IHC and genetic markers in order to better stratify patients more likely to respond to treatment.

### Example 54

### Treatment of Macrophages with Culture Conditions That Promote Cell Cycle Progression Provides Payload Delivery Following Infection of Immunomodulatory Bacterial Strains Containing Plasmid Payloads

[1805] Ectopic gene expression following plasmid transfer requires actively proliferating cells (Mortimer et al., (1999) Gene Therapy 6:403-411). While M1-differentiating factors such as IFNγ and LPS have been shown to impair cell cycle progression in macrophages, M2-differentiating factors such as M-CSF and efferocytosis of apoptotic cells were shown to promote macrophage cell cycle progression (Röszer et al., (2018) Cells 7(8):103; Nasser et al., (2020) Cell Death Discov 6:63). As differentiation of M2 TAMs is commonly performed using M-CSF with the addition of IL-4 and IL-10, the role of these cytokines in promoting cell cycle remained to be determined. According to the literature, primary human macrophages could be induced to proliferate with M-CSF, but proliferation was impaired with the addition of GM-CSF or IL-4 (Nasser et al., (2020) Cell Death Discov 6:63). Further, it was shown in mouse and human macrophages that the addition of M-CSF with either IL-4 and/or IL-10 induced upregulation of MAFB. The role these macrophage differentiation conditions have on promoting macrophage proliferation and payload delivery in our system remained to be determined.

[1806] Experiments were performed to assess the effects of adding IL-4 and IL-10 to the M-CSF differentiation media, as well as whether the addition of apoptotic tumor cells would enhance proliferation and payload delivery.

[1807] For this, frozen human monocytes, isolated from healthy human donors, were thawed in complete medium (RPMI-1640+10% FBS), and washed by washed by centrifugation for 10 minutes at 600×g at room temperature. Monocytes were resuspended in ImmunoCult™-SF Macrophage Medium (StemCell Technologies) containing 100 ng/mL human M-CSF. Monocytes (2.5e5 per well) then were seeded in a 48-well plate with a final volume of 500 μL. Five days later (on day 5), fresh medium with cytokines were added to generate M0 and M2 macrophages. To generate primary human M0 macrophages, 250 μL of ImmunoCult™-SF Macrophage Medium containing 150 ng/mL human M-CSF was added per well and incubated for 48 hours. To generate primary human M2 macrophages, 250 μL of ImmunoCult™-SF Macrophage Medium containing 150 ng/mL human M-CSF+60 ng/mL human IL-4+60 ng/mL human IL-10 was added per well and incubated for 48 hours. To promote cell cycle progression, apoptotic Jurkat cells were added to the corresponding media.

[1808] On day 7, duplicate wells were infected at an MOI of 10, for two hours in RPMI, with the YS1646Δasd/ΔFLG/ΔpagP/ΔansB/ΔcsgD strains containing either a plasmid encoding NanoLuciferase® or huIL-15Rα-IL-15sc+huSTING N154S/R284G tazCTT. The cells were washed 3 times with PBS and resuspended in RPMI+100 μg/mL gentamicin (Sigma).

[1809] After 48 hours, supernatants were harvested and evaluated for downstream signaling differences using a custom human M2/M1 U-Plex® panel (Meso Scale Discovery), according to the manufacturer's protocol. Cytokine secretion was measured, and the average of the duplicate was calculated.

[1810] For qPCR analysis, the cells were collected for RNA isolation using the RNeasy® Plus Mini Kit (Qiagen), according to the manufacturer's instructions. Total RNA concentration was measured using a NanoDrop™ 2000 UV-Vis Spectrophotometer (Thermo Scientific). The purity of each sample also was assessed from the A₂₆₀/A₂₃₀ absorption ratio. Synthesis of cDNA was performed from 0.5-1 μg of template RNA using a CFX96™ Real-Time System (Bio-Rad) and iScript™ Reverse Transcription Supermix for RT-qPCR (Bio-Rad) in a 20 μL reaction, according to the manufacturer's instructions. qPCR was performed with a CFX96 Real-Time System (Bio-Rad). Custom qPCR primers for IL-15, SEQ ID NOs: 496-499, as above, (For: 5′-GCAAGAGGAATTTTGCCATCG (SEQ ID NO:496); Rev: 5′-TTGCTCCATCCCGCTAATG (SEQ ID NO:497)) and STING (For: AACTCTGGTTTCAAGCGTAAAG (SEQ ID NO:498); Rev: CAGGGCAGGGTCTCTAATG (SEQ ID NO:499)) were prepared. The qPCR reaction (20 μL) was conducted per protocol, using either the SsoAdvanced Universal SYBR® Green Supermix or the iQ Multiplex Powermix (Bio-Rad). The standard thermocycling program on the Bio-Rad CFX96 Real-Time System consisted of a 95° C. denaturation for 150 sec, followed by 39 cycles of 95° C. for 15 sec and 60° C. for 55 sec. Quantification of the target mRNA was normalized using Actin reference mRNA (Bio-Rad, qHsaCEP0036280). ΔC_{q} was calculated as the difference between the target and reference gene.

[1811] As shown in the tables below, the presence of apoptotic Jurkat cells induced higher payload delivery in M2 macrophages differentiated in M-CSF, both in gene expression as well as enhanced IFNβ over the untransfected and plasmid control groups. The addition of IL-4 and IL-10 to the M-CSF media suppressed payload expression and eliminated the production of IFNβ, CXCL10, and payload-dependent IL-16 from STING activity. Interestingly, addition of apoptotic Jurkats partially rescued this phenotype, with higher gene expression, and slightly higher payload-specific IFNβ and IL-6, but no CXCL10.

[1812] These data demonstrate that conditions which enhance macrophage cell cycle progression, such as M-CSF and apoptotic cells, enhances payload delivery and payload-driven cytokine production. However, the addition of factors such as IL-4 and IL-10 that impair cell cycle will also impair payload delivery. As MAFB upregulation was previously shown to impair type I IFN production in human macrophages following cytosolic RNA sensing, there may be suppression happening from IL-4 and IL-10 beyond cell cycle that may impair payload-induced IFNβ (Kim et al., (2010) Nat Immunol. 11(8):743-50).

| | eSTING (Fold Expression | | |
|---|---|---|---|
| | Over Reference Gene) | | |
| | | | STACT |
| | | STACT | IL-15plex + |
| Treatments | Uninfected | NanoLuc ® | STING |
| M-CSF | 1.97E−04 | 1.00E−04 | 8.58E−02 |
| M-CSF + Apoptotic Jurkats | 6.00E−04 | 2.75E−04 | 1.45E−01 |
| M-CSF + IL-4 + IL-10 | 0.00E+00 | 2.78E−04 | 4.48E−02 |
| M-CSF + IL-4 + IL-10 + AJ | 0.00E+00 | 6.25E−04 | 1.83E−01 |

Analyte Concentration (pg/ml)

| | | | | STACT |
|---|---|---|---|---|
| | | | STACT | IL-15plex + |
| | | Uninfected | NanoLuc ® | eSTING |
| IFN-β | M-CSF | 15.5 | 41.6 | 72.0 |
| | M-CSF + AJ | 50.4 | 39.7 | 134.4 |
| | M-CSF + | 3.9 | 42.7 | 27.2 |
| | IL-4 + IL-10 | | | |
| | M-CSF + | 5.4 | 27.5 | 43.2 |
| | AJ + IL-4 + | | | |
| | IL-10 | | | |
| CXCL10/ | M-CSF | 425.9 | 2012 | 9366 |
| IP-10 | M-CSF + AJ | 2609 | 2428 | 8312 |
| | M-CSF + | 52.3 | 30.2 | 344 |
| | IL-4 + IL-10 | | | |
| | M-CSF + | 140.8 | 36.0 | 185.6 |
| | AJ + IL-4 + | | | |
| | IL-10 | | | |
| IL-6 | M-CSF | .78 | 1800 | 7759 |
| | M-CSF + AJ | 8.8 | 1852 | 3926 |
| | M-CSF + | 1.0 | 133 | 823 |
| | IL-4 + IL-10 | | | |
| | M-CSF + | 4.1 | 303 | 1350 |
| | AJ + IL-4 + | | | |
| | IL-10 | | | |

[1813] In a previous study, it was determined that liver Kupffer cells, while phagocytic, were not proliferating and thus could not transfer and express payloads Whether these cells could be induced to proliferate by cell culture conditions remained to be determined. To assess this, a study was also performed to determine whether non-proliferating Kupffer cells can be induced to proliferate by culturing with apoptotic hepatocytes.

[1814] For this, frozen human monocytes, isolated from healthy human donors, were thawed in complete medium (RPMI-1640+10% FBS), and washed by washed by centrifugation for 10 minutes at 600×g at room temperature. Monocytes were resuspended in ImmunoCult™-SF Macrophage Medium (StemCell Technologies) containing 100 ng/mL human M-CSF. Monocytes (2.5e5 per well) then were seeded in a 48-well plate with a final volume of 500 μL. Five days later (on day 5), fresh medium with cytokines were added to generate M2 macrophages. To generate primary human M2 macrophages, 250 μL of ImmunoCult™-SF Macrophage Medium containing 150 ng/mL human M-CSF+60 ng/mL human IL-4+60 ng/mL human IL-10 was added per well and incubated for 48 hours. Kupffer and HUVEC cells were seeded one day prior to infection, with the Kupffer cells seeded in Collagen-I treated wells and co-cultured with densely-seeded hepatocytes to promote apoptotic cell death. On day 7, duplicate wells were infected at an MOI of 100, for two hours in RPMI, with the YS1646Δasd/ΔFLG/ΔpagP/ΔansB/ΔcsgD strains containing either a plasmid encoding NanoLuciferase® or huIL-15Rα-IL-15sc+huSTING N154S/R284G tazCTT. The cells then were washed 3 times with PBS and resuspended in RPMI+100 μg/mL gentamicin (Sigma). After 48 hours, supernatants were harvested, cleared of cell debris and analysed for cytokine profile using a U-Plex® (Meso Scale Discovery).

[1815] As shown in the table below, along with the on-target, payload-mediated cytokines produced by the M2 macrophages treated with the YS1646Δasd/ΔFLG/ΔpagP/ΔansB/ΔcsgD strain encoding huIL-15Rα-IL-15sc+huSTING N154S/R284G tazCTT, payload delivery also occurred in the Kupffer cells cultured with apoptotic hepatocytes. IFN-β and IP-10, both secondary cytokines from STING activation, were induced in a payload-dependent manner in M2 macrophages and Kupffer+apoptotic hepatocytes, but not in the non-phagocytic HUVEC cells. These data indicate that Kupffer cells can become permissive to payload delivery when induced to proliferate with apoptotic hepatocytes.

| | M2 Macrophages | | | | Kupffer/Hepatocytes | | | | HUVEC | | | |
|---|---|---|---|---|---|---|---|---|---|---|---|---|
| | IFN-β | IP-10 | IL-6 | TNF-α | IFN-β | IP-10 | IL-6 | TNF-α | IFN-β | IP-10 | IL-6 | TNF-α |
| Uninfected | 15.5 | 394 | 0.8 | 5.3 | 6.2 | 353 | 20 | 4.7 | 6.8 | 11.1 | 167 | 3.3 |
| NanoLuc ® | 41.6 | 2012 | 1800 | 1284 | 44.8 | 2726 | 331 | 1239 | 26.4 | 95.4 | 1995 | 5.3 |
| IL-15 + | 80 | 9366 | 7759 | 2975 | 76.4 | 5253 | 2586 | 5888 | 8.0 | 225 | 1771 | 5.3 |
| eSTING | | | | | | | | | | | | |

### Example 55

### Fibrotic Diseases Are Enriched in Proliferating Macrophages and Provides Delivery of Gene Therapies Encoding Therapeutic Payloads to Tissue-Resident Macrophages

[1816] The finding that macrophages and liver Kupffer cells can be induced to proliferate by co-culturing them with apoptotic cells has important therapeutic implications. In the case of Kupffer cells, it has been described in the literature in the field of non-alcoholic steatohepatitis (NASH), a disease where liver damage leads to inflammation and liver fibrosis, that Kupffer cells phagocytose damaged hepatocytes (Li et al., (2020) Front Immunol 11:1169). Similarly, proliferating SPP1V macrophages have been described in the diseased fibrotic lungs of IPF patients and not in healthy tissues, and they increase with disease progression (Morse et al., (2019) Eur Respir J 54(2):1802441). As such, gene delivery of plasmids containing therapeutic payloads to these tissues results in the DNA being transferred and expressed by these proliferating macrophages, and payloads will not be expressed in other cells. This provides a therapeutic opportunity for treating lung and liver fibrosis patients with DNA-containing therapeutics.

### Example 56

### Therapies That Promote Tumor Apoptosis Provide Enrichment of Phagocytic and Proliferating Macrophages and Enhance Payload Delivery of Gene Therapies in Tumor-Resident Macrophages

[1817] The ability to enhance plasmid payload delivery in tumors can be achieved through induction of apoptosis, which recruits phagocytic and proliferating macrophages that are required for DNA transfer to tumor-resident macrophages. Several types of chemotherapy have been described to promote tumor apoptosis, including docetaxel (DTX), paclitaxel (PTX), doxorubicin (DOX), 5-fluorouracil (5-FU), carboplatin (CARB), and cyclophosphamide (CTX) (Anfray et al., (2019) Cells 9(1):46). Treatment of mice bearing 4T1 breast tumors with CTX, DTX, DOX and 5-FU all induced significant F4/80⁺ macrophage infiltration and enhanced disease progression (Zhao et al., (2017) Cancer Res 77(21):6021-6032). A similar effect was observed in CT26 colon cancer models, where treatment of tumor bearing mice, or tumor cells prior to implantation with 5-FU resulted in significant infiltration of SPP1⁺ macrophages and disease progression (Chang et al., (2019) FASEB J 33(1):114-125). Similar studies could be clinically translated, where patients could be selected for that have been previously treated with apoptotic chemotherapies and have progressed. To this end, an analysis was performed on published data of the breast cancer PROMIX trial, where patients were assessed for biomarkers following either 2 cycles of epirubicin and docetaxol, or 4 cycle of chemotherapy+surgery and bevacizumab (Kimbung et al., (2018) Int J Cancer 142(3):618-628). The published datasets were then analyzed for tumor expression of CD68 following these treatments, as well as the expression of CD68 in each treatment cycle in the basal, HER2, and luminal A/B PAM50 subtypes.

[1818] As shown in the box plots in FIG. 28, significant increases in CD68⁺ macrophages were observed across all breast cancer patients after 2 cycles of chemotherapy with apoptosis-inducing DOX, while CD68⁺ macrophages were significantly reduced in patients treated for 4 cycles with chemotherapy+bevacizumab and surgery. The effect was even more pronounced for basal and luminal subtypes (see FIG. 29). These data show that combination therapy can be advantageous; the data show that prior treatment with chemotherapy can enhance the therapeutic effect of immunostimulatory bacteria provided here by increasing the number of proliferating macrophages in the tumors.

[1819] Other therapeutic strategies to enhance the amount of proliferating macrophages in tumors prior to dosing can be achieved with pre-treatment with anti-PD-1. The role that PD-1 and PD-L1 play on myeloid cell biology has been underappreciated relative to their roles in T-cell—tumor cell interactions (Lecoultre et al., (2020) JITC 8(2):e001408). In a previously published study using murine and human macrophages, PD-1 expression increased on tumor macrophages with increasing disease progression. PD-1 expression on macrophages was impaired phagocytosis, while treatment with anti-PD-1 reversed that effect (Gordon et al., (2017) Nature 545(7655):495-499). In a separate study, PD-L1 expression on macrophages was shown to be an indicator of macrophage activation. Treatment of macrophages with anti-PD-L1 repolarized them to an M1-like inflammatory phenotype, and impaired phagocytosis (Hartley et al., Cancer Immunol Res 2020; Hartley et al., (2018) Cancer Immunol Res 6(10):1260-1273).

[1820] To determine the effects of the checkpoint therapies on the phagocytic functions of primary human macrophages, a study was performed using M1 and M2-derived primary human macrophages. For this, frozen human monocytes, isolated from healthy human donors, were thawed in complete medium (RPMI-1640+10% FBS), and washed by washed by centrifugation for 10 minutes at 600×g at room temperature. Monocytes were resuspended in ImmunoCult™-SF Macrophage Medium (StemCell Technologies) containing 100 ng/mL human M-CSF. Monocytes (2.5e5 per well) then were seeded in a 48-well plate with a final volume of 500 μL. Five days later (on day 5), fresh medium with cytokines were added to generate M1 and M2 macrophages. To generate primary human M1 macrophages, 250 μL of ImmunoCult™-SF Macrophage Medium containing 10 ng/mL LPS+50 ng/mL IFNγ was added per well and incubated for 48 hours. To generate primary human M2 macrophages, 250 μL of ImmunoCult™-SF Macrophage Medium containing 150 ng/mL human M-CSF+60 ng/mL human IL-4+60 ng/mL human IL-10 was added per well and incubated for 48 hours. 100-ug/mL of anti-mPD-L1-mIgG1e3 (InvivoFit) were added to the corresponding samples and incubated for 48 hours.

[1821] On day 7, duplicate wells were infected at an MOI of 10, for two hours in RPMI, with the following strains: YS1646Δasd/ΔFLG/ΔpagP/ΔansB/ΔcsgD strain containing a plasmid encoding huIL-15Rα-IL-15sc+huSTING N154S/R284G tazCTT. The cells were washed 3 times with PBS and resuspended in RPMI+100 μg/mL gentamicin (Sigma).

[1822] For flow cytometry analysis, cells were washed with 500-uL of DPBS and detached by incubating with 10-mM EDTA in PBS on ice for 20-min. Lifted cells were washed once with flow buffer (PBS+2% FBS) and resuspended in 100-uL of LIVE/DEAD Violet Fixable Viability Dye. After 20-min incubation at RT, cells were washed once with flow buffer and resuspended in 50 μL of flow buffer containing True-Stain Monocyte Blocker and Human TruStain FcX. After 10-min incubation on ice, cell surface flow cytometry antibodies PD-L1 BV785 clone 2E9.2A3; PD-1 PE-Cy7 clone EH12.2H7 (all from BioLegend) were added. After 20-min of incubation on ice and in the dark, cells were washed twice with flow buffer. Cells then were resuspended in flow buffer and data were acquired using the NovoCyte® flow cytometer (ACEA Biosciences, Inc.) and analyzed using FlowJo™ software (Tree Star, Inc.).

[1823] For the phagocytosis assay, 1.5e5 CFSE-labeled apoptotic Raji (induced by 24 hours 1-mM H₂O₂ treatment) or pHrodo™ Green E. coli BioParticles™ Conjugate (Invitrogen) were added to each well and incubate at 37° C. After 3 hours, the cells were washed with 500-uL of DPBS and detached by incubating with 10-mM EDTA in PBS on ice for 20-min. Lifted cells were washed once with flow buffer (PBS+2% FBS) and resuspended in 50 μL of flow buffer containing True-Stain Monocyte Blocker and Human TruStain FcX. After 10-min incubation on ice, cell surface flow cytometry antibody SIRPα PE-Cy7 clone SE5A5 (BioLegend) were added. After 20-min of incubation on ice and in the dark, cells were washed twice with flow buffer. Cells then were resuspended in flow buffer and data were acquired using the NovoCyte® flow cytometer (ACEA Biosciences, Inc.) and analyzed using FlowJo™ software (Tree Star, Inc.). SIRPα-positive population was gated to differentiate macrophages from apoptotic Raji and pHrodo™ Green E. coli BioParticles™ Conjugate.

| | | Cell Surface | |
|---|---|---|---|
| | Apoptotic Jurkat | Expression (MFI) | |
| Treatments | Phagocytosis [MFI] | PD-1 | PD-L1 |
| M1 Mac Untreated | 5.52E+05 | 6.07E+02 | 4.89E+04 |
| M2 Mac Untreated | 1.43E+06 | 9.12E+02 | 2.70E+04 |
| M2 + STACT IL- | — | 5.36E+02 | 6.68E+04 |
| 15plex + eSTING | | | |
| M2 + anti-PD-L1 | 1.12E+06 | 1.90E+03 | 1.29E+03 |
| M2 + anti-PD-L1 + | — | 1.04E+03 | 2.57E+04 |
| STACT IL-15plex + | | | |
| eSTING | | | |

[1824] The results of this study confirm that treatment with anti-PD-L1 upregulates PD-1 expression and impairs macrophage phagocytosis of apoptotic tumor cells by M2 macrophages. Treatment of macrophages following infection with the immunostimulatory bacteria encoding huIL-15Rα-IL-15sc and huSTING N154S/R284G tazCTT with anti-PD-L1 restores the expression of PD-1 back to baseline. These data indicate a treatment protocol comprising: treatment with anti-PD-1, followed by the immunostimulatory bacteria, followed by immunotherapy, where patients are pre-treated with anti-PD-1 to suppress PD-1 expression on macrophages and promote their phagocytic capacity prior to treatment with the bacteria, followed by treatment with the immunostimulatory bacteria, and then delaying treatment with anti-PD-L1 until the plasmid payloads have been delivered so that PD-L1 is then induced on macrophages, after which anti-PD-L1 therapy can be administered.

### Example 57

### Exemplary Constructs and Plasmids For Immunostimulatory Bacteria

[1825] The delivery vehicles, particularly the immunostimulatory bacteria provided herein contain plasmids that encode a payload, such as a cytokine or cytokine and cytosolic DNA/RNA sensor, or any other combinations described or contemplated herein. Among the constructs included in the plasmids are those that encode a type I interferon (IFN), such as an IFNa and/or IFNb. The constructs are for inclusion in a plasmid in a immunostimulatory bacterium, including those with the genome modifications described throughout the disclosure herein, and in particular immunostimulatory bacterium that have genome modifications resulting in attenuated TLR2 activity or attenuated TLR2 and TLR4 and/or TLR5 activity. These include the bacteria that have genome modifications that result in penta-acylated LPS, lack flagella, and also lack curli fimbriae, such as, for example, the Salmonella bacteria with such genome modifications. For example, the bacteria as exemplified that have the phenotype YS1646Δasd/ΔFLG/ΔpagP/ΔansB/ΔcsgD/F-ΔpurI, or YS1646Δasd/ΔFLG/ΔpagP/ΔansB/ΔcsgD/F-ΔpurI/ΔthyA, or any of the exemplified bacteria that accumulate in the tumor microenvironment, and particularly in tumor-resident macrophages.

[1826] Encoding a type I interferon (IFN), such as an IFNa and/or INFb in such bacteria can result in conversion of an immune desert tumor or a T-cell excluded tumor into a “hot “tumor, which is responsive to immunotherapy, and also, can, depending upon the additional payload convert macrophage into the M1/M2 hybrid phenotype.

[1827] A series of exemplary constructs, including regulatory sequences are provided herein, and exemplary nucleic acid sequences are set forth in SEQ ID NOs. 502-501. The components are indicated in the sequence listing and described below. Protein sequences of encoded protein also are included in the sequence listing.

[1828] SEQ ID NOs:502-545 set forth the sequences of constructs containing human IFNa2 and/or IFN-b. The constructs include eukaryotic promoters and enhancers, such as viral promoters and enhancers, optional IRES sequences for translation in eukaryotic cells, peptide-encoding sequences, such as sequences that encode a 2A peptide for polycistronic sequences that result in two translated proteins, and other such regulatory sequences. Each of the constructs, as set forth in the sequence listing contains a kanR gene, which is optional and/or can be replaced or eliminated, for growth in selective medium. Other optional components can be included on the plasmids as described throughout the disclosure herein. The constructs can encode other polypeptides, including other immunostimulatory proteins, as described throughout the disclosure herein. The constructs can include spacers, LTRs, UTRs, origins of replication and other such sequences as known to those of skill in the art and/or as described throughout the disclosure herein.

[1829] SEQ ID NOs:549 and 551 set forth the nucleotide sequence of a human IFNa2 and human IFN-b, respectively. SEQ ID NOs:550 and 552 set forth the amino acid sequence of human IFNa2 and human IFN-b, respectively.

[1830] SEQ ID NO:502 sets forth the sequence of a pATI 1.76 (see Example 8, which describes the pATI 1.75 and 1.76 vectors)-based construct that contains a high-copy number ColE1/pMB1/pBR322/pUC origin of replication (nucleotides 822-1410); a CMV enhancer (nucleotides 1704-2007); a CMV promoter (nucleotides 2008-2211); a TATA signal (nucleotides 2197-2203 and 3784-3790); a 5′ UTR (nucleotides 2212-2255); a Kozak sequence (nucleotides 2256-2261 and 4161-4166); human IFNa2 opt 15 (NM_000605.4, nucleotides 2265-2825, where the start and stop codons are encoded by nucleotides 2262-2264 and 2826-2828, respectively); an HPRE (nucleotides 2838-3371); a bGH poly(A) signal (nucleotides 3380-3604); a promoter spacer (nucleotides 3605-3634); an EF-1-alpha promoter (nucleotides 3635-3846); a 5′ LTR (nucleotides 3859-4127); human IFN-b opt 15 (nucleotides 4170-4727, where the start and stop codons are encoded by nucleotides 4167-4169 and 4728-4730, respectively); a WPRE (nucleotides 4780-5386); an SV40 poly(A) signal (nucleotides 5391-5512); and KanR complement (nucleotides 5858-6667). SEQ ID NO:503 sets forth the sequence of a construct with the same components as SEQ ID NO:502, except that human IFNa2 and IFN-b are not opt 15.

[1831] SEQ ID NO:504 sets forth the sequence of a pATI 1.76 construct that contains a high-copy number ColE1/pMB1/pBR322/pUC origin of replication (nucleotides 822-1410); a CMV enhancer (nucleotides 1704-2007); a CMV promoter (nucleotides 2008-2211); a TATA signal (nucleotides 2197-2203); a 5′ UTR (nucleotides 2212-2255); a Kozak sequence (nucleotides 2256-2261); human IFNa2 opt 1 (nucleotides 2265-2825, where the start codon is encoded by nucleotides 2262-2264); a GGS linker (nucleotides 2826-2834); T2A opt 1 (nucleotides 2835-2888); human IFN-b opt 1 (nucleotides 2889-3446, where the stop codon is encoded by nucleotides 3447-3449); an HPRE (nucleotides 3460-3993); a bGH poly(A) signal (nucleotides 4002-4226); a duplexed DNA insert (nucleotides 4205-4284); and KanR complement (nucleotides 4491-5300). SEQ ID NO:505 sets forth the sequence of a construct with the same components as SEQ ID NO:504, except that human IFNa2, IFN-b and T2A are not opt 1.

[1832] SEQ ID NO:506 sets forth the sequence of a pATI 1.76 construct that contains a high-copy number ColE1/pMB1/pBR322/pUC origin of replication (nucleotides 822-1410); a CMV enhancer (nucleotides 1704-2007); a CMV promoter (nucleotides 2008-2211); a TATA signal (nucleotides 2197-2203); a 5′ UTR (nucleotides 2212-2255); a Kozak sequence (nucleotides 2256-2261); human IFNa2 opt 12 (nucleotides 2265-2825, where the start and stop codons are encoded by nucleotides 2262-2264 and 2826-2828, respectively); a ribosomal binding site (VCIP IRES ATUM, nucleotides 2829-3418); human IFNb opt 12 (nucleotides 3422-3979, where the start and stop codons are encoded by nucleotides 3419-3421 and 3980-3982, respectively); an HPRE (nucleotides 3993-4526); a bGH poly(A) signal (nucleotides 4535-4759); a duplexed DNA insert (nucleotides 4738-4817); and KanR complement (nucleotides 5024-5833). SEQ ID NO:507 sets forth the sequence of a construct with the same components as SEQ ID NO:506, except that human IFNa2 and IFN-b are not opt 12.

[1833] SEQ ID NO:508 sets forth the sequence of a pATI 1.76 construct that contains a high-copy number ColE1/pMB1/pBR322/pUC origin of replication (nucleotides 822-1410); a CMV enhancer (nucleotides 1704-2007); a CMV promoter (nucleotides 2008-2211); a TATA signal (nucleotides 2197-2203 and 3781-3787); a 5′ UTR (nucleotides 2212-2255); a Kozak sequence (nucleotides 2256-2261 and 4158-4163); human IFNb opt 13 (nucleotides 2265-2822, where the start and stop codons are encoded by nucleotides 2262-2264 and 2823-2825, respectively); an HPRE (nucleotides 2835-3368); a bGH poly(A) signal (nucleotides 3377-3601); a promoter spacer (nucleotides 3602-3631); an EF-1 alpha promoter (nucleotides 3632-3843); a 5′ LTR (nucleotides 3856-4124); human IFNa2 opt 13 (nucleotides 4167-4727, where the start and stop codons are encoded by nucleotides 4164-4166 and 4728-4730, respectively); a WPRE (nucleotides 4780-5368); a SV40 poly(A) signal (nucleotides 5391-5512); and KanR complement (nucleotides 5858-6667). SEQ ID NO:509 sets forth the sequence of a construct with the same components as SEQ ID NO:508, except that human IFNa2 and IFN-b are not opt 13.

[1834] SEQ ID NO:510 sets forth the sequence of a pATI 1.76 construct that contains a high-copy number ColE1/pMB1/pBR322/pUC origin of replication (nucleotides 822-1410); a CMV enhancer (nucleotides 1704-2007); a CMV promoter (nucleotides 2008-2211); a TATA signal (nucleotides 2197-2203); a 5′ UTR (nucleotides 2212-2255); a Kozak sequence (nucleotides 2256-2261); human IFNb opt 2 (nucleotides 2265-2822, where the start codon is encoded by nucleotides 2262-2264); a GGS linker opt 2 (nucleotides 2823-2831); a T2A opt 2 (nucleotides 2832-2885); human IFNa2 opt 2 (nucleotides 2886-3446, where the stop codon is encoded by nucleotides 3447-3449); an HPRE (nucleotides 3460-3993); a bGH poly(A) signal (nucleotides 4002-4226); a duplexed DNA insert (nucleotides 4205-4284); and KanR complement (nucleotides 4491-5300). SEQ ID NO:511 sets forth the sequence of a construct with the same components as SEQ ID NO:510, except that human IFNa2, IFN-b, the GGS linker and T2A are not opt 2.

[1835] SEQ ID NO:512 sets forth the sequence of a pATI 1.76 construct that contains a high-copy number ColE1/pMB1/pBR322/pUC origin of replication (nucleotides 822-1410); a CMV enhancer (nucleotides 1704-2007); a CMV promoter (nucleotides 2008-2211); a TATA signal (nucleotides 2197-2203); a 5′ UTR (nucleotides 2212-2255); a Kozak sequence (nucleotides 2256-2261); human IFNb opt 10 (nucleotides 2265-2822, where the start and stop codons are encoded by nucleotides 2262-2264 and 2823-2825, respectively); a ribosomal binding site (VCIP IRES ATUM, nucleotides 2826-3415); human IFNa2 opt 10 (nucleotides 3419-3979, where the start and stop codons are encoded by nucleotides 3416-3418 and 3980-3982, respectively); an HPRE (nucleotides 3993-4526); a bGH poly(A) signal (nucleotides 4535-4759); a duplexed DNA insert (nucleotides 4738-4817); and KanR complement (nucleotides 5024-5833). SEQ ID NO:513 sets forth the sequence of a construct with the same components as SEQ ID NO:512, except that human IFNa2 and IFN-b are not opt 10.

[1836] SEQ ID NO:514 sets forth the sequence of a pATI 1.76 construct that contains a high-copy number ColE1/pMB1/pBR322/pUC origin of replication (nucleotides 822-1410); a CMV enhancer (nucleotides 1704-2007); a CMV promoter (nucleotides 2008-2211); a TATA signal (nucleotides 2197-2203); a 5′ UTR (nucleotides 2212-2255); a ribosomal binding site (VCIP IRES, nucleotides 2256-2802); human IFNa2 opt 8 (nucleotides 2806-3366, where the start codon is encoded by nucleotides 2803-2805); a GGS linker opt 8 (nucleotides 3367-3375); T2A opt 8 (nucleotides 3376-3429); human IFN-b opt 8 (nucleotides 3430-3987, where the stop codon is encoded by nucleotides 3988-3990); an HPRE (nucleotides 4001-4534); a bGH poly(A) signal (nucleotides 4543-4767); a duplexed DNA insert (nucleotides 4746-4825); and KanR complement (nucleotides 5032-5841). SEQ ID NO:515 sets forth the sequence of a construct with the same components as SEQ ID NO:514, except that human IFNa2, IFN-b, the GGS linker and T2A are not opt 8.

[1837] SEQ ID NO:516 sets forth the sequence of a pATI 1.76 construct that contains a high-copy number ColE1/pMB1/pBR322/pUC origin of replication (nucleotides 822-1410); a CMV enhancer (nucleotides 1704-2007); a CMV promoter (nucleotides 2008-2211); a TATA signal (nucleotides 2197-2203); a 5′ UTR (nucleotides 2212-2255); a ribosomal binding site (VCIP IRES, nucleotides 2256-2802); human IFNb opt 7 (nucleotides 2806-3363, where the start codon is encoded by nucleotides 2803-2805); a GGS linker opt 7 (nucleotides 3364-3372); T2A opt 7 (nucleotides 3373-3426); human IFNa2 opt 7 (nucleotides 3427-3987, where the stop codon is encoded by nucleotides 3988-3990); an HPRE (nucleotides 4001-4534); a bGH poly(A) signal (nucleotides 4543-4767); a duplexed DNA insert (nucleotides 4746-4825); and KanR complement (nucleotides 5032-5841). SEQ ID NO:517 sets forth the sequence of a construct with the same components as SEQ ID NO:516, except that human IFNa2, IFN-b, the GGS linker and T2A are not opt 7.

[1838] SEQ ID NO:518 sets forth the sequence of a pATI 1.77 construct that contains a high-copy number ColE1/pMB1/pBR322/pUC origin of replication (nucleotides 822-1410); a CMV enhancer (nucleotides 1704-2007); a CMV promoter (nucleotides 2008-2211); a TATA signal (nucleotides 2197-2203 and 3827-3833); a 5′ UTR (nucleotides 2212-2298); a Kozak sequence (nucleotides 2299-2304 and 4204-4209); human IFNa2 opt 40 (nucleotides 2308-2868, where the start and stop codons are encoded by nucleotides 2305-2307 and 2869-2871, respectively); an HPRE (nucleotides 2881-3414); a bGH poly(A) signal (nucleotides 3423-3647); a promoter spacer (nucleotides 3648-3677); an EF-1-alpha promoter (nucleotides 3678-3889); a 5′ LTR (nucleotides 3902-4170); human IFN-b opt 40 (nucleotides 4213-4770, where the start and stop codons are encoded by nucleotides 4210-4212 and 4771-4773, respectively); a WPRE (nucleotides 4823-5411); an SV40 poly(A) signal (nucleotides 5434-5555); and KanR complement (nucleotides 5901-6710). SEQ ID NO:519 sets forth the sequence of a construct with the same components as SEQ ID NO:518, except that human IFNa2 and IFN-b are not opt 40.

[1839] SEQ ID NO:520 sets forth the sequence of a pATI 1.77 construct that contains a high-copy number ColE1/pMB1/pBR322/pUC origin of replication (nucleotides 822-1410); a CMV enhancer (nucleotides 1704-2007); a CMV promoter (nucleotides 2008-2211); a TATA signal (nucleotides 2197-2203); a 5′ UTR (nucleotides 2212-2298); a Kozak sequence (nucleotides 2299-2304); human IFNa2 opt 28 (nucleotides 2308-2868, where the start codon is encoded by nucleotides 2305-2307); a GGS linker opt 28 (nucleotides 2869-2877); T2A opt 28 (nucleotides 2878-2931); human IFN-b opt 28 (nucleotides 2932-3489, where the stop codon is encoded by nucleotides 3490-3492); an HPRE (nucleotides 3503-4036); a bGH poly(A) signal (nucleotides 4045-4269); a duplexed DNA insert (nucleotides 4248-4327); and KanR complement (nucleotides 4534-5343). SEQ ID NO:521 sets forth the sequence of a construct with the same components as SEQ ID NO:520, except that human IFNa2, IFN-b, the GGS linker and T2A are not opt 28.

[1840] SEQ ID NO:522 sets forth the sequence of a pATI 1.77 construct that contains a high-copy number ColE1/pMB1/pBR322/pUC origin of replication (nucleotides 822-1410); a CMV enhancer (nucleotides 1704-2007); a CMV promoter (nucleotides 2008-2211); a TATA signal (nucleotides 2197-2203); a 5′ UTR (nucleotides 2212-2298); a Kozak sequence (nucleotides 2299-2304); human IFNa2 opt 28 (nucleotides 2308-2868, where the start codon is encoded by nucleotides 2305-2307); a GGS linker opt 28 (nucleotides 2869-2877); T2A opt 28 (nucleotides 2878-2931); human IFN-b opt 28 (nucleotides 2932-3489, where the stop codon is encoded by nucleotides 3490-3492); an HPRE (nucleotides 3503-4036); a SV40 poly(A) signal (nucleotides 4067-4188); and KanR complement (nucleotides 4395-5204). SEQ ID NO:523 sets forth the sequence of a construct with the same components as SEQ ID NO:522, except that human IFNa2, IFN-b, the GGS linker and T2A are not opt 28.

[1841] SEQ ID NO:524 sets forth the sequence of a pATI 1.77 construct that contains a high-copy number ColE1/pMB1/pBR322/pUC origin of replication (nucleotides 822-1410); a CMV enhancer (nucleotides 1704-2007); a CMV promoter (nucleotides 2008-2211); a TATA signal (nucleotides 2197-2203); a 5′ UTR (nucleotides 2212-2298); a Kozak sequence (nucleotides 2299-2304); human IFNa2 opt 36 (nucleotides 2308-2868, where the start and stop codons are encoded by nucleotides 2305-2307 and 2869-2871, respectively); a ribosomal binding site (VCIP IRES ATUM, nucleotides 2872-3461); human IFN-b opt 36 (nucleotides 3465-4022, where the start and stop codons are encoded by nucleotides 3462-3464 and 4023-4025, respectively); an HPRE (nucleotides 4036-4569); a bGH poly(A) signal (nucleotides 4578-4802); a duplexed DNA insert (nucleotides 4781-4860); and KanR complement (nucleotides 5067-5876). SEQ ID NO:525 sets forth the sequence of a construct with the same components as SEQ ID NO:524, except that human IFNa2 and IFN-b are not opt 36.

[1842] SEQ ID NO:526 sets forth the sequence of a pATI 1.77 construct that contains a high-copy number ColE1/pMB1/pBR322/pUC origin of replication (nucleotides 822-1410); a CMV enhancer (nucleotides 1704-2007); a CMV promoter (nucleotides 2008-2211); a TATA signal (nucleotides 2197-2203); a 5′ UTR (nucleotides 2212-2298); a Kozak sequence (nucleotides 2299-2304); human IFNa2 opt 36 (nucleotides 2308-2868, where the start and stop codons are encoded by nucleotides 2305-2307 and 2869-2871, respectively); a ribosomal binding site (VCIP IRES ATUM, nucleotides 2872-3461); human IFN-b opt 36 (nucleotides 3465-4022, where the start and stop codons are encoded by nucleotides 3462-3464 and 4023-4025, respectively); an HPRE (nucleotides 4036-4569); a SV40 poly(A) signal (nucleotides 4600-4721); and KanR complement (nucleotides 4928-5737). SEQ ID NO:527 sets forth the sequence of a construct with the same components as SEQ ID NO:526, except that human IFNa2 and IFN-b are not opt 36.

[1843] SEQ ID NO:528 sets forth the sequence of a pATI 1.77 construct that contains a high-copy number ColE1/pMB1/pBR322/pUC origin of replication (nucleotides 822-1410); a CMV enhancer (nucleotides 1704-2007); a CMV promoter (nucleotides 2008-2211); a TATA signal (nucleotides 2197-2203 and 3824-3830); a 5′ UTR (nucleotides 2212-2298); a Kozak sequence (nucleotides 2299-2304 and 4201-4206); human IFNb opt 41 (nucleotides 2308-2865, where the start and stop codons are encoded by nucleotides 2305-2307 and 2866-2868, respectively); an HPRE (nucleotides 2878-3411); a bGH poly(A) signal (nucleotides 3420-3644); a promoter spacer (nucleotides 3645-3674); an EF-1 alpha promoter (nucleotides 3675-3886); a 5′ LTR (nucleotides 3899-4167); human IFNa2 opt 41 (nucleotides 4210-4770, where the start and stop codons are encoded by nucleotides 4207-4209 and 4771-4773, respectively); a WPRE (nucleotides 4823-5411); a SV40 poly(A) signal (nucleotides 5434-5555); and KanR complement (nucleotides 5901-6710). SEQ ID NO:529 sets forth the sequence of a construct with the same components as SEQ ID NO:508, except that human IFNa2 and IFN-b are not opt 41.

[1844] SEQ ID NO:530 sets forth the sequence of a pATI 1.77 construct that contains a high-copy number ColE1/pMB1/pBR322/pUC origin of replication (nucleotides 822-1410); a CMV enhancer (nucleotides 1704-2007); a CMV promoter (nucleotides 2008-2211); a TATA signal (nucleotides 2197-2203); a 5′ UTR (nucleotides 2212-2298); a Kozak sequence (nucleotides 2299-2304); human IFNb opt 29 (nucleotides 2308-2865, where the start codon is encoded by nucleotides 2305-2307); a GGS linker opt 29 (nucleotides 2866-2874); T2A opt 29 (nucleotides 2875-2928); human IFNa2 opt 29 (nucleotides 2929-3489, where the stop codon is encoded by nucleotides 3490-3492); an HPRE (nucleotides 3503-4036); a bGH poly(A) signal (nucleotides 4045-4269); a duplexed DNA insert (nucleotides 4248-4327); and KanR complement (nucleotides 4534-5343). SEQ ID NO:531 sets forth the sequence of a construct with the same components as SEQ ID NO:530, except that human IFNa2, IFN-b, the GGS linker and T2A are not opt 29.

[1845] SEQ ID NO:532 sets forth the sequence of a pATI 1.77 construct that contains a high-copy number ColE1/pMB1/pBR322/pUC origin of replication (nucleotides 822-1410); a CMV enhancer (nucleotides 1704-2007); a CMV promoter (nucleotides 2008-2211); a TATA signal (nucleotides 2197-2203); a 5′ UTR (nucleotides 2212-2298); a Kozak sequence (nucleotides 2299-2304); human IFNb opt 29 (nucleotides 2308-2865, where the start codon is encoded by nucleotides 2305-2307); a GGS linker opt 29 (nucleotides 2866-2874); T2A opt 29 (nucleotides 2875-2928); human IFNa2 opt 29 (nucleotides 2929-3489, where the stop codon is encoded by nucleotides 3490-3492); an HPRE (nucleotides 3503-4036); a SV40 poly(A) signal (nucleotides 4067-4188); and KanR complement (nucleotides 4395-5204). SEQ ID NO:533 sets forth the sequence of a construct with the same components as SEQ ID NO:532, except that human IFNa2, IFN-b, the GGS linker and T2A are not opt 29.

[1846] SEQ ID NO:534 sets forth the sequence of a pATI 1.77 construct that contains a high-copy number ColE1/pMB1/pBR322/pUC origin of replication (nucleotides 822-1410); a CMV enhancer (nucleotides 1704-2007); a CMV promoter (nucleotides 2008-2211); a TATA signal (nucleotides 2197-2203); a 5′ UTR (nucleotides 2212-2298); a Kozak sequence (nucleotides 2299-2304); human IFNb opt 37 (nucleotides 2308-2865, where the start and stop codons are encoded by nucleotides 2305-2307 and 2866-2868, respectively); a ribosomal binding site (VCIP IRES ATUM, nucleotides 2869-3458); human IFNa2 opt 37 (nucleotides 3462-4022, where the start and stop codons are encoded by nucleotides 3459-3461 and 4023-4025, respectively); an HPRE (nucleotides 4036-4569); a bGH poly(A) signal (nucleotides 4578-4802); a duplexed DNA insert (nucleotides 4781-4860); and KanR complement (nucleotides 5067-5876). SEQ ID NO:535 sets forth the sequence of a construct with the same components as SEQ ID NO:534, except that human IFNa2 and IFN-b are not opt 37.

[1847] SEQ ID NO:536 sets forth the sequence of a pATI 1.77 construct that contains a high-copy number ColE1/pMB1/pBR322/pUC origin of replication (nucleotides 822-1410); a CMV enhancer (nucleotides 1704-2007); a CMV promoter (nucleotides 2008-2211); a TATA signal (nucleotides 2197-2203); a 5′ UTR (nucleotides 2212-2298); a Kozak sequence (nucleotides 2299-2304); human IFNb opt 37 (nucleotides 2308-2865, where the start and stop codons are encoded by nucleotides 2305-2307 and 2866-2868, respectively); a ribosomal binding site (VCIP IRES ATUM, nucleotides 2869-3458); human IFNa2 opt 37 (nucleotides 3462-4022, where the start and stop codons are encoded by nucleotides 3459-3461 and 4023-4025, respectively); an HPRE (nucleotides 4036-4569); a SV40 poly(A) signal (nucleotides 4600-4721); and KanR complement (nucleotides 4928-5737). SEQ ID NO:537 sets forth the sequence of a construct with the same components as SEQ ID NO:536, except that human IFNa2 and IFN-b are not opt 37.

[1848] SEQ ID NO:538 sets forth the sequence of a pATI 1.77 construct that contains a high-copy number ColE1/pMB1/pBR322/pUC origin of replication (nucleotides 822-1410); a CMV enhancer (nucleotides 1704-2007); a CMV promoter (nucleotides 2008-2211); a TATA signal (nucleotides 2197-2203); a 5′ UTR (nucleotides 2212-2298); a ribosomal binding site (VCIP IRES, nucleotides 2299-2845); human IFNa2 opt 35 (nucleotides 2849-3409, where the start codon is encoded by nucleotides 2846-2848); a GGS linker opt 35 (nucleotides 3410-3418); T2A opt 35 (nucleotides 3419-3472); human IFNb opt 35 (nucleotides 3473-4030, where the stop codon is encoded by nucleotides 4031-4033); an HPRE (nucleotides 4044-4577); a bGH poly(A) signal (nucleotides 4586-4810); a duplexed DNA insert (nucleotides 4789-4868); and KanR complement (nucleotides 5075-5884). SEQ ID NO:539 sets forth the sequence of a construct with the same components as SEQ ID NO:538, except that human IFNa2, IFN-b, the GGS linker and T2A are not opt 35.

[1849] SEQ ID NO:540 sets forth the sequence of a pATI 1.77 construct that contains a high-copy number ColE1/pMB1/pBR322/pUC origin of replication (nucleotides 822-1410); a CMV enhancer (nucleotides 1704-2007); a CMV promoter (nucleotides 2008-2211); a TATA signal (nucleotides 2197-2203); a 5′ UTR (nucleotides 2212-2298); a ribosomal binding site (VCIP IRES, nucleotides 2299-2845); human IFNa2 opt 35 (nucleotides 2849-3409, where the start codon is encoded by nucleotides 2846-2848); a GGS linker opt 35 (nucleotides 3410-3418); T2A opt 35 (nucleotides 3419-3472); human IFNb opt 35 (nucleotides 3473-4030, where the stop codon is encoded by nucleotides 4031-4033); an HPRE (nucleotides 4044-4577); a SV40 poly(A) signal (nucleotides 4608-4729); and KanR complement (nucleotides 4936-5745). SEQ ID NO:541 sets forth the sequence of a construct with the same components as SEQ ID NO:540, except that human IFNa2, IFN-b, the GGS linker and T2A are not opt 35.

[1850] SEQ ID NO:542 sets forth the sequence of a pATI 1.77 construct that contains a high-copy number ColE1/pMB1/pBR322/pUC origin of replication (nucleotides 822-1410); a CMV enhancer (nucleotides 1704-2007); a CMV promoter (nucleotides 2008-2211); a TATA signal (nucleotides 2197-2203); a 5′ UTR (nucleotides 2212-2298); a ribosomal binding site (VCIP IRES, nucleotides 2299-2845); human IFNb opt 33 (nucleotides 2849-3406, where the start codon is encoded by nucleotides 2846-2848); a GGS linker opt 33 (nucleotides 3407-3415); T2A opt 33 (nucleotides 3416-3469); human IFNa2 opt 33 (nucleotides 3470-4030, where the stop codon is encoded by nucleotides 4031-4033); an HPRE (nucleotides 4044-4577); a bGH poly(A) signal (nucleotides 4586-4810); a duplexed DNA insert (nucleotides 4789-4868); and KanR complement (nucleotides 5075-5884). SEQ ID NO:543 sets forth the sequence of a construct with the same components as SEQ ID NO:542, except that human IFNa2, IFN-b, the GGS linker and T2A are not opt 33.

[1851] SEQ ID NO:544 sets forth the sequence of a pATI 1.77 construct that contains a high-copy number ColE1/pMB1/pBR322/pUC origin of replication (nucleotides 822-1410); a CMV enhancer (nucleotides 1704-2007); a CMV promoter (nucleotides 2008-2211); a TATA signal (nucleotides 2197-2203); a 5′ UTR (nucleotides 2212-2298); a ribosomal binding site (VCIP IRES, nucleotides 2299-2845); human IFNb opt 33 (nucleotides 2849-3406, where the start codon is encoded by nucleotides 2846-2848); a GGS linker opt 33 (nucleotides 3407-3415); T2A opt 33 (nucleotides 3416-3469); human IFNa2 opt 33 (nucleotides 3470-4030, where the stop codon is encoded by nucleotides 4031-4033); an HPRE (nucleotides 4044-4577); a SV40 poly(A) signal (nucleotides 4608-4729); and KanR complement (nucleotides 4936-5745). SEQ ID NO:545 sets forth the sequence of a construct with the same components as SEQ ID NO:544, except that human IFNa2, IFN-b, the GGS linker and T2A are not opt 33.

### Example 58

### THP1 Monocyte/Macrophage Cell Line Bactofection and Payload Expression

### Material & Methods

[1852] For Examples 58-60, the bacterial strain, unless otherwise noted, is the Salmonella strain that is ΔpurI/ΔmsbB/Δasd/ΔfljB/ΔfliC/ΔpagP/ΔansB/ΔcsgD and contains a plasmid (SEQ ID NO.: 501) encoding the chimeric STING and IL-15 receptor complex. It is exemplary of STACT bacteria.

THP1 differentiation into macrophages (M0, M1, M2)

[1853] Wild type (WT) Dual THP-1 cells were seeded in 96-well plate at 1e5 cells/well, in RPMI media supplemented with 10% FBS and 20 ng/ml PMA (ThermoFisher, J63916 MCR). PMA was washed away after 24h incubation and fresh complete RPMI media was added to rest for 3 days before polarization. M1/M2 polarization was done with treatment of 250 ng/ml LPS+25 ng/ml IFNgamma or 20 ng/ml IL-4+20 ng/ml IL-10 for 48h.

Labeling of Immunostimulatory Bacteria with Dyes

[1854] YS1646Δasd/ΔFLG/ΔpagP/ΔansB/ΔcsgD (YS1646 is ΔpurI/ΔmsbB) encoding the chimeric STING and IL-15 receptor complex on the plasmid, where the plasmid has the sequence set forth in SEQ ID NO:501 (also referred to as a STACT bacterium in this example), was dyed with pHRodo® dye following manufacturer's protocol (Invitrogen, P35357), and then with CellTrace® Violet (Invitrogen, C34571) before bactofection. Stock bacteria of this strain were washed in their culture medium (17000 rpm, 5 min). The bacteria pellet was resuspended in 1 ml of staining buffer, then mixed with pHRodo® dye and incubated for 2h at room temperature, protected from light. Bacterial growth medium was added to recover bacteria and scavenge unreacted dye. Bacteria pellet was collected and resuspend in PBS, then mixed with CellTrace® Violet and incubated for 20 min, at room temperature, protected from light. RPMI, 10% FBS was added and incubated for 5 min to remove free dye in the solution. Bacteria pellet was collected after centrifugation and resuspend in RPMI, 10% FBS to allow CellTrace® reagent to undergo acetate hydrolysis before bactofection as 50 ul of bacteria solution was added to corresponding wells followed by centrifugation at 500 g/5 min, and incubation at 37° C./1h.

### Flow Cytometry for Phenotypic Markers and Dyes

[1855] Untreated and STACT infected THP-1 cells were stained with live/dead stain (Invitrogen, L34992), 100 ul/well for 30 min and washed before being stained with 50 ul/well of Fc block (Biolegend, 422302) and Monocyte blocker (Biolegend, 426103) for 10 min/4° C. Antibody mixture of CD40 (BV421), HLA-DR (BV570), CD206 (BV605), CD86 (BV650), CD209 (PE), HLA-ABC (PE-Dazzle) and CD163 (PE-Cy7) was mixed in FACS buffer (PBS, 2% FBS) and added to samples with 50 ul/well. Samples were washed twice between each staining step with 100 ul/well of FACS buffer. Vybrant® DyeCyle was diluted 1:4000 in FACS buffer and added to samples at 100 ul/well right before proceeding to flow analysis with flow cytometer (NovoCyte® 3000) without washing.

### STING Reporter Luciferase Assay

[1856] After bactofection of the cells, bacteria solution was removed and replaced with fresh complete RPMI media containing 50 ug/ml Gentamicin. Supernatant was collected at 90 min, 3h, 24h, and 48h after bactofection to detect luciferase by QUANTI-Luc™ (InvivoGen, rep-qlc1) and luminometer. Briefly, 25 ul of supernatant sample was added to each well of opaque 96-well plate, then 50 ul of QUANTI-Luc™ assay solution was added to each well and gently the plate was tapped to mix the solution and proceed immediately to luciferase measurement using luminometer.

### Cell Cycle Assessment

[1857] Vybrant® DyeCycle (Invitrogen, V35005) was diluted 1:4000 in FACS buffer and added to samples in 96-well (100 ul/well) before proceeding flow cytometer (NovoCyte® 3000) analysis without washing.

### Results

[1858] pHRodo® is a dye that is fluorescent only in acidic cellular compartments, such as in late endosomes and lysosomes. Salmonella is known to facilitate its uptake into cells and reside in phagosomes (F Garcia-del Portillo (1996) Microbiologica pubmed.ncbi.nlm.nih.gov/21178464/doi:10.3791/56514).

[1859] FIG. 30 shows pHRodo® and CellTrace® labeling of YS1646Δasd/ΔFLG/ΔpagP/ΔansB/ΔcsgD containing the plasmid encoding IL-15 receptor complex and chimeric STING, where the plasmid has the sequence set forth in SEQ ID NO:501, over time internalized by THP1 differentiated into M0. Wild type (WT) Dual THP-1 cells were seeded in 96-well plate at 1e5 cells/well, in RPMI media supplemented with 10% FBS and 20 ng/ml PMA. PMA was washed away after 24h incubation and fresh complete RPMI media was added to rest for 3 days before bactofection. YS1646Δasd/ΔFLG/ΔpagP/ΔansB/ΔcsgD containing the plasmid encoding IL-15 receptor complex and chimeric STING, where the plasmid has the sequence set forth in SEQ ID NO:501, was labeled with pHRodo® dye following manufacturer's protocol (Invitrogen, P35357) and then CellTrace® Violet (Invitrogen, C34571) before bactofection at MOI 1, 5, 20, and 40. Briefly, 50 ul of bacteria solution was added to corresponding wells followed by centrifugation at 500 g/5 min, and incubation at 37° C./1h. Bacteria solution was removed and fresh complete RPMI media containing 50 ug/ml Gentamicin was added until cells were harvested for flow analysis. Cells were stained with live/dead stain (Invitrogen, L34992) for 30 min before being analyzed by flow cytometer (NovoCyte® 3000).

[1860] pHRodo positive cells correlate with MOI increase at 90 min to 48 hrs (FIG. 30). pHRodo positive cells increase from 90 min to 48 hrs indicating increased bacterial presence within lysosomes.

[1861] As shown in FIGS. 31A-F, M0, M1, and M2 macrophages show uptake of YS1646Δasd/ΔFLG/ΔpagP/ΔansB/ΔcsgD containing the plasmid encoding IL-15 receptor complex and chimeric STING, where the plasmid has the sequence set forth in SEQ ID NO:501, internally. Wild type (WT) Dual THP-1 cells were seeded in 96-well plate at 1e5 cells/well, in RPMI media supplemented with 10% FBS and 20 ng/ml PMA. PMA was washed away after 24h incubation and fresh complete RPMI media was added to the rest for 3 days before polarization. M1/M2 polarization was done with treatment of 250 ng/ml LPS+25 ng/ml IFNγ or 20 ng/ml IL-4+20 ng/ml IL-10 for 48h. The strain STACT containing a plasmid (SEQ ID NO:501) encoding a chimeric constitutive STING and IL-15/IL-15R alpha chain complex was dyed with pHRodo® dye following manufacturer's protocol (Invitrogen, P35357) and then CellTrace® Violet (Invitrogen, C34571) before bactofection at MOI 1, 5, 20, and 40. 50 ul of bacteria solution was added to corresponding wells followed by centrifugation at 500 g/5 min, and incubation at 37° C./1h. Bacteria solution was removed and fresh complete RPMI media containing 50 ug/ml Gentamicin was added until cells were harvested for flow analysis. Data were analyzed by FlowJo 10 and graphed by Prism 9.

[1862] The bacteria are internalized and trafficked to acidic lysosomes and nuclei in human macrophages (FIGS. 31A-F). M0, M1 and M2 macrophages exhibit increased intracellular presence and lysosomal trafficking of YS1646Δasd/ΔFLG/ΔpagP/ΔansB/ΔcsgD containing the plasmid encoding IL-15 receptor complex and chimeric STING, where the plasmid has the sequence set forth in SEQ ID NO:501, with increasing MOI (FIGS. 31A-F).

[1863] FIGS. 32A and 32B depict STING reporter luciferase activity in wild-type M0 THP1 derived macrophages. Wild type (WT) Dual THP-1 cells were seeded in 96-well plate at 1e5 cells/well, in RPMI media supplemented with 10% FBS and 20 ng/ml PMA. PMA was washed away after 24h incubation and fresh complete RPMI media was added to rest for 3 days before bactofection.

[1864] YS1646Δasd/ΔFLG/ΔpagP/ΔansB/ΔcsgD containing the plasmid encoding IL-15 receptor complex and chimeric STING, where the plasmid has the sequence set forth in SEQ ID NO:501, was dyed with pHRodo® dye following manufacturer's protocol (Invitrogen, P35357) and then CellTrace® Violet (Invitrogen, C34571) before bactofection at MOI 1, 5, 20, and 40. Briefly, 50 ul of bacteria solution was added to corresponding wells followed by centrifugation at 500 g/5 min, and incubation at 37C/1h. Bacteria solution was removed and replaced with fresh complete RPMI media containing 50 ug/ml Gentamicin. cGAMP (InvivoGen, tlrl-nacga23-02) was added at 20 ng/ml. Supernatant was collected at 90 min, 3h, 24, and 48h after bactofection to detect luciferase by QUANTI-Luc™ (InvivoGen, rep-qlc1) and luminometer.

[1865] Increased STING reporter luciferase expression is observed with increasing YS1646Δasd/ΔFLG/ΔpagP/ΔansB/ΔcsgD containing the plasmid encoding IL-15 receptor complex and chimeric STING, where the plasmid has the sequence set forth in SEQ ID NO:501, MOI (FIGS. 32A and 32B) and pHRodo positivity at 90 min and 48 hrs (FIG. 30).

[1866] FIG. 33 depicts cell cycle dependent internalization of STACT. Wild type (WT) Dual THP-1 cells were seeded in a 96-well plate at 1e5 cells/well, in RPMI medium supplemented with 10% FBS and 20 ng/ml PMA. PMA was washed away after 24h incubation and fresh complete RPMI medium was added to rest for 3 days before polarization. M1/M2 polarization was done with treatment of 250 ng/ml LPS+25 ng/ml IFNγ or 20 ng/ml IL-4+20 ng/ml IL-10 for 48h. YS1646Δasd/ΔFLG/ΔpagP/ΔansB/ΔcsgD containing the plasmid encoding IL-15 receptor complex and chimeric STING, where the plasmid has the sequence set forth in SEQ ID NO:501, was dyed with pHRodo® dye following manufacturer's protocol (Invitrogen, P35357) before bactofection with the plasmid-containing STACT, and also with the STACT bacterium without the plasmid as a control. 50 ul of bacteria solution was added to corresponding wells followed by centrifugation at 500 g/5 min, and incubation at 37C/1h. Bacteria solution was removed and fresh complete RPMI media containing 50 ug/ml Gentamicin was added until cells were harvested for flow analysis. Cells were stained with live/dead stain (Invitrogen, L34992) for 30 min. Vybrant® DyeCycle (Invitrogen, V35005) was added right before proceeding flow cytometer (NovoCyte® 3000) analysis without washing. Data was analyzed by FlowJo 10 and graphed by Prism 9.

[1867] To quantify cell cycle phases, Vybrant® Dyecycle dye was used in live cells. As the dye increases, it delineates G0/G1 (low uptake of the dye) with intermediate uptake of the dye in cells in S phase and highest uptake of the dye observed in cells in the G2/M phase (FIG. 33, top left schematic panel). At 48 hrs, the highest level of phRodo+bacteria are seen in G2/M phase of cell cycle in macrophages (M0, M1 and M2), with a much smaller percentage of bacterial uptake in G0/G1 phase. These phenomena are independent of the differentiation phenotype of the macrophages (M0, M1, M2) (FIG. 33).

[1868] The results show that YS1646Δasd/ΔFLG/ΔpagP/ΔansB/ΔcsgD containing the plasmid encoding IL-15 receptor complex and chimeric STING, where the plasmid has the sequence set forth in SEQ ID NO:501, induces phenotypic changes in macrophages upon bactofection in cells that have the bacterium in lysosomes (i.e., pHRodo positive). YS1646Δasd/ΔFLG/ΔpagP/ΔansB/ΔcsgD containing the plasmid encoding IL-15 receptor complex and chimeric STING, where the plasmid has the sequence set forth in SEQ ID NO:501, taken up by M0 macrophages into lysosomes results in increased expression of M1 (HLA-DR, CD86) and M2 (CD163, CD206, CD209) markers measured via specific antibodies for each marker using flow cytometry at 90 mins. The results also show that cell cycle internalization is independent of macrophage type, as the internalization of the bacterium that lacks a plasmid and encoded payload also is cell cycle dependent.

### Example 59

### Anti-PD-1 and Immunostimulatory Bacteria Combination Therapy

### Material & Methods

[1869] Cell Culture Growth and Harvest:

[1870] Cell Line: EMT6-M

[1871] Media: Waymouth's and 15% Fetal Bovine Serum

[1872] Growth Conditions: 37° C., 5% CO₂

[1873] Seed Cell Density: 3×10⁶

[1874] Implant Cell Density: 1×10⁵/Mouse

[1875] Implant Site: 2^{nd} Mammary Fat Pad, Orthotopic Implantation

[1876] Needle Gauge: 30G

[1877] Implant Volume: 100 μL/mouse

[1878] Mice:

[1879] Sex: Female

[1880] Age: 6-8 weeks

[1881] Source Vendor: Charles River

[1882] Bedding: Wood Chips

[1883] Enrichment: Paper Shred

[1884] Light/Dark Cycle: 12 hr/12 hr

### Cell Implantation Methods

[1885] Cells are grown in culture flasks on site at Actym Therapeutics in Berkeley, CA, and prepared for injection once needed number of cells is obtained (i.e., 2-7 days). Cells are prepared to the correct cell density required and kept at 4° C. (wet ice) while transferred via vehicle to Explora Marina Village in Alameda, CA. A 1 mL syringe is filled with ˜0.6 mL of the cell mixture. The hub of the syringe is cleaned and dried with gauze. A 30G needle is attached to the filled syringe and the bevel is made to face up aligned with the volume indication numbers on the syringe. The needle and syringe are cleared of air bubbles and set to 0.5 mL. A total of 5 mice (1 cage) are implanted using the same needle and syringe set up. Between animals the syringe is kept horizontal on ice on a rocking platform. Animals are implanted after a minimum of 3 days acclimatization time in the vivarium holding room. At 2.5-3% Isoflurane the mice are anesthetized in an induction chamber, the animal is transferred to the nose cone and placed supine on a clean absorbent bench pad. The second mammary fat pad is identified and shaved with clippers to remove fur from the immediate area. The shaved area is cleaned with a 70% isopropyl alcohol swab. Using fine pointed forceps, the area immediately adjacent to the nipple is held to isolate the nipple area. At time of implantation while gently lifting the said area the needle is introduced into the nipple area just under the skin. A total volume of 0.1 mL (100 mL) of cell mixture is injected to create a “bubbled up” appearance at the mammary fat pad. While using the fine forceps to pinch around the needle it is then removed. The skin is held in the forceps for 3 seconds after removal of the needle this to prevent leakage from the injection site. The area is observed for outflow and gently dried with gauze if necessary. The animal is removed from the nose cone and returned to the home cage for recovery. A new needle and syringe are used with every cage. The animals are visually monitored one day after cell implantation for abnormal behavior or adverse health.

[1886] Tumor Measurement and Volume Calculation: When tumors are palpable, generally, Day 4-6 post-implant (100,000 cell/mouse at implant) they are measured using Fowler Calipers and measurements are recorded and calculated using StudyLog® software. Specifically, tumor volumes are calculated using the following mathematical formula (Length×Width²)/2=mm³, all groups are randomized on the day of treatment or one day prior (as required by schedule constraints).

[1887] Group Randomization: Animals dosed at the schedule of 2-3 days prior to the primary therapy of YS1646Δasd/ΔFLG/ΔpagP/ΔansB/ΔcsgD containing the plasmid encoding IL-15 receptor complex and chimeric STING, where the plasmid has the sequence set forth in SEQ ID NO:501, are normalized into groups based on body weight. For all other groups when tumors are a relevant size as determined by the study design (i.e., 50-75 mm³) the animals are randomized into groups based on a normalized tumor size. StudyLog® software randomizes the animals based on tumor volume accordingly. The animals are physically rearranged into cages with animals of the same group. Up to five animals are housed in a cage but no less than 2 animals are placed per cage (i.e., no single housed animals are allowed).

### Dilution of Anti-PD-1 Antibody:

### Source:

[1888] InvivoGen Recombinant mouse mAb against murine PD-1, Anti-mPD-1-mIgG1e3 (InvivoFit). After reconstitution of the 10 mg lyophilized antibody with 5 mL of sterile water the concentration is 2 mg/mL. In a sterile 0.9% Sodium Chloride vial containing 7.5 mL, a volume of 2.5 mL of the anti-PD-1 (5 mg) is added making a 0.5 mg/mL solution. The solution is kept a 4° C. for a maximum of 1 month.

### Dosing Anti-PD-1 Antibody:

[1889] Each mouse is restrained, and the ventral portion is exposed. The animal is dosed into the intraperitoneal cavity at a volume of 0.2 mL of the 0.5 mg/mL using a 27G needle. The dosed amount is 100 μg/mouse. The dosing regimen is once every 3-4 days i.e., 2×/week IP dosing.

### Primary Therapy Dosing:

[1890] YS1646Δasd/ΔFLG/ΔpagP/ΔansB/ΔcsgD containing the plasmid encoding IL-15 receptor complex and chimeric STING, where the plasmid has the sequence set forth in SEQ ID NO:501, is dosed via the lateral tail vein of the mouse at a volume of 0.2 mL/mouse in a single dose. The mouse is placed a restraint device after warming in a heated chamber. The area of injection is cleaned with a 70% isopropyl alcohol swab. A 27G needle is attached to a 1 mL syringe containing YS1646Δasd/ΔFLG/ΔpagP/ΔansB/ΔcsgD (containing the plasmid encoding IL-15 receptor complex and chimeric STING, where the plasmid has the sequence set forth in SEQ ID NO:501) with the appropriate CFU concentration. The needle is introduced into a lateral tail vein and the dosing solution is dosed at a volume of 0.2 mL. The area is covered and pressured is applied with a clean gauze to stop any back flow of dosing solution and bleeding. The animal is placed in a recovery cage and allowed to return to normal body temperature while being monitored for any abnormal reactions to the manipulation. After complete recovery, the animal is placed in the home cage and returned to the holding rack.

[1891] EMT6 typically is an immune excluded anti-PD-1 non-responsive breast cancer syngeneic orthotopic tumor model. Pre-treatment of EMT6 orthotopic mammary fat pad tumor bearing female balb/c mice with an anti-PD-1 antibody when dosed intraperitoneally two days prior (and every 3-4 days thereafter) to a single intravenous dose of YS1646Δasd/ΔFLG/ΔpagP/ΔansB/ΔcsgD containing the plasmid encoding IL-15 receptor complex and chimeric STING, where the plasmid has the sequence set forth in SEQ ID NO:501, at 3e7 CFU. A lower than maximally efficient dose of YS1646Δasd/ΔFLG/ΔpagP/ΔansB/ΔcsgD containing the plasmid encoding IL-15 receptor complex and chimeric STING, where the plasmid has the sequence set forth in SEQ ID NO:501, was chosen in order to observe a combination effect. YS1646Δasd/ΔFLG/ΔpagP/ΔansB/ΔcsgD containing the plasmid encoding IL-15 receptor complex and chimeric STING, where the plasmid has the sequence set forth in SEQ ID NO:501, had a TGI of 30% compared to PBS group, with 29% cure rate. Anti-PD-1 monotherapy had a TGI of 0%, with no cures in the treatment group. In combination, YS1646Δasd/ΔFLG/ΔpagP/ΔansB/ΔcsgD containing the plasmid encoding IL-15 receptor complex and chimeric STING, where the plasmid has the sequence set forth in SEQ ID NO:501, and anti-PD-1 mAb treatment had a TGI of 62% and 46% cure rate, when the antibody was provided 2 days prior to the treatment with YS1646Δasd/ΔFLG/ΔpagP/ΔansB/ΔcsgD containing the plasmid encoding IL-15 receptor complex and chimeric STING, where the plasmid has the sequence set forth in SEQ ID NO:501. When the anti-PD-1 was provided on the same day as YS1646Δasd/ΔFLG/ΔpagP/ΔansB/ΔcsgD containing the plasmid encoding IL-15 receptor complex and chimeric STING, where the plasmid has the sequence set forth in SEQ ID NO:501, 13% tumor growth inhibition (TGI) and 7% cure rate was observed. Thus, pre-treatment with the anti-PD-1 antibody two (2) days prior to treatment with the immunostimulatory bacteria was more effective then pre-treatment one day prior to treatment.

| | TGI % | Cures % |
|---|---|---|
| | (N = 14) | (N = 14) |
| PBS | — | 0 |
| YS1646Δasd/ΔFLG/ΔpagP/ΔansB/ΔcsgD | 30 | 29 |
| containing the plasmid encoding IL-15 | | |
| receptor complex and chimeric STING, | | |
| where the plasmid has the sequence set | | |
| forth in SEQ ID NO: 501, | | |
| PD-1 mAb only | 0 | 0 |
| YS1646Δasd/ΔFLG/ΔpagP/ΔansB/ΔcsgD | 62 | 46 |
| containing the plasmid encoding IL-15 | | |
| receptor complex and chimeric STING, | | |
| where the plasmid has the sequence set | | |
| forth in SEQ ID NO: 501 + PD-1 mAb (d- | | |
| 2 dose) | | |
| YS1646Δasd/ΔFLG/ΔpagP/ΔansB/ΔcsgD | 13 | 7 |
| containing the plasmid encoding IL-15 | | |
| receptor complex and chimeric STING, | | |
| where the plasmid has the sequence set | | |
| forth in SEQ ID NO: 501 + PD-1 mAb (d- | | |

0 dose)

### Example 60

### Indication Expansion And Syngeneic Model Selection Analysis

### Material & Methods

### Dataset Pre-Processing

[1892] The Cancer Genome Atlas (TCGA) was downloaded from GDS Portal (portal.gdc.cancer.gov) and UCSD Xenia database (xenabrowser.net). MET500 data were downloaded from UCSC Xena database (xenabrowser.net). A syngeneic tumor model dataset was downloaded from TISMO database (tismo.cistrome.org).

### Data Analysis

[1893] Since each gene has multiple transcripts with distinct ensemble IDs, ensemble ID level data were collapsed into gene-level log 2 FPKM counts using collapseRows function in WGCNA package in R. Pathway signature scores were calculated as scaled z-scores across the genes within a given gene signature shown below. Heatmap and other plots were plotted using the pheatmap and ggplot2 packages respectively.
[1894] Adenosine—CD39, CD73, A1R, A2a/bR, A3R
[1895] Corvus ADO—IL1B, PTGS2, CXCL1, CXCL2, CXCL3, CXCL5, CXCL6, CXCL8—Fong et al. (2020) Can Discovery doi: 10.1158/2159-8290.CD-19-0980
[1896] AZ ADO—PPARG, CYBB, COL3A1, FOXP3, LAG3, APP, CD81, GPI, PTGS2, CASP1, FOS, MAPK1, MAPK3, CREB1—Sidders et al. (2020) Clin. Cancer Res. doi: 10.1158/1078-0432.CCR-19-2183
[1897] Purine metabolism—PPAT, DCK, ATIC, IMPDH1, RRM2 (doi.org/10.3389/fonc.2020.583053)
[1898] Antigen presentation
   [1899] MHC I (HLA-A/B/C),
   [1900] MHC II (HLA-DP/DQ/DR)
[1901] Krummel T cell infiltration (doi.org/10.1016rj.cell.2021.12.004)
[1902] Krummel Stromal infiltration
[1903] Krummel Myeloid infiltration
[1904] SPP1 and C1QC TAM (doi: 10.3389/fimmu.2021.694801)
[1905] Glycolysis—GLUT1, LDHA
[1906] Hypoxiad—HIF1a, VEGFA, GLUT1
[1907] Glutamine—GLS2
[1908] TGFbeta—TGFB1, TGFBR1/2
   Tumor indications are denoted by abbreviations shown in the Table below.

| Study | |
|---|---|
| Abbreviation | Study Name |
| LAML | Acute Myeloid Leukemia |
| ACC | Adrenocortical carcinoma |
| BLCA | Bladder Urothelial Carcinoma |
| LGG | Brain Lower Grade Glioma |
| BRCA | Breast invasive carcinoma |
| CESC | Cervical squamous cell carcinoma and |
| | endocervical adenocarcinoma |
| CHOL | Cholangiocarcinoma |
| LCML | Chronic Myelogenous Leukemia |
| COAD | Colon adenocarcinoma |
| ESCA | Esophageal carcinoma |
| GBM | Glioblastoma multiforme |
| HNSC | Head and Neck squamous cell carcinoma |
| KICH | Kidney Chromophobe |
| KIRC | Kidney renal clear cell carcinoma |
| KIRP | Kidney renal papillary cell carcinoma |
| LIHC | Liver hepatocellular carcinoma |
| LUAD | Lung adenocarcinoma |
| LUSC | Lung squamous cell carcinoma |
| DLBC | Lymphoid Neoplasm Diffuse Large B-cell Lymphoma |
| MESO | Mesothelioma |
| MISC | Miscellaneous |
| OV | Ovarian serous cystadenocarcinoma |
| PAAD | Pancreatic adenocarcinoma |
| PCPG | Pheochromocytoma and Paraganglioma |
| PRAD | Prostate adenocarcinoma |
| READ | Rectum adenocarcinoma |
| SARC | Sarcoma |
| SKCM | Skin Cutaneous Melanoma |
| STAD | Stomach adenocarcinoma |
| TGCT | Testicular Germ Cell Tumors |
| THYM | Thymoma |
| THCA | Thyroid carcinoma |
| UCS | Uterine Carcinosarcoma |
| UCEC | Uterine Corpus Endometrial Carcinoma |
| UVM | Uveal Melanoma |

### Results

[1909] As tumors grow in size, they tend to become hypoxic with high levels of HIF1a (FIG. 34). As a consequence, several oncogenes such as TGFb, c-Myc coupled with necrosis and apoptosis are upregulated in the tumor microenvironment together leading to an increased level of ATP. This increase subsequently triggers CD39 and CD73, ectonucleotidases that break down ATP into AMP and adenosine respectively. STACT is dependent on adenosine as an auxotroph for its colonization and survival in the TME. It is difficult to assess tumor adenosine levels since adenosine tends to be quite unstable and taken up by cells. Therefore CD73, CD39 published adenosine signatures as surrogate markers of tumors with high adenosine that are coupled with high levels of hypoxia and TGFbeta pathways are used. FIG. 34 shows that high levels of adenosine and immune exclusion are triggered by hypoxia in tumors.

[1910] FIGS. 35A and 35B depict CD73 and CD39 expression across solid tumor indications in TCGA. Tumors with high CD73 and CD39 expression are shown in FIGS. 35A and 35B. In FIG. 35B, median expression of each tumor indication for CD73 and CD39 was obtained. This identifies top adenosine rich indications such as thyroid, NSCLC, ccRCC (KIRC), mesothelioma (MESO), colorectal (COAD, READ), esophageal (ESCA), stomach (STAD), sarcoma (SARC), pancreatic (PAAD), HNSC, liver (HCC) and glioma (LGG, GBM) cancers.

[1911] FIGS. 36A and 36B depict T cell, stromal and myeloid cell signatures across solid tumor indications in TCGA. Expression of T cell, myeloid and stromal signatures from Combes et al. (2020) Cell doi.org/10.1016/j.cell.2021.12.004 was used to identify tumors with high T cells, myeloid and stromal cell presence. This showed that indications such as thymoma, TGCT, ccRCC (KIRC), DLBCL, NSCLC (LUAD, LUSC), Mesothelioma (MESO), pancreatic (PAAD), breast, sarcoma and stomach cancer had the highest presence of T cells, myeloid and stromal cells (FIGS. 36A and 36B).

[1912] FIGS. 37A-F depict myeloid cell markers across Thorsson et al. (2018) defined immune subtypes C1-C6 in TCGA. Highest phagocytic myeloid population was observed in C6 Immune subtype (TGFb dominant) defined in Thorrson et al. (2018) Immunity doi.org/10.1016/j.immuni.2018.03.023 (FIGS. 37C-F). This also shows the connection between high TGFbeta, adenosine and high myeloid presence with an immunosuppressive phenotype since C6 subtype was shown to have highest levels of M2 macrophages (Thorsson et al. (2018) Immunity doi.org/10.1016/j.immuni.2018.03.023).

[1913] All of the above information was combined with previously published adenosine response signatures and metabolic pathways that typically associate with high levels of hypoxia. From this, top indications that associate with high colonization of immunostimulatory bacteria provided herein, such as the bacteria that lack flagella, are msbB⁻/pagP⁻, and that are auxotrophic for adenosine and derivatives thereof, were identified. Also identified were top indications that associate with high colonization of these bacteria due to high hypoxia, adenosine, myeloid and T cell presence and efficacy in primary tumors in TCGA (FIG. 38) and metastatic cancers in MET500 (FIG. 39). Both datasets identified top indications indicated in FIG. 38 and FIG. 39. FIG. 38 depicts indications with high myeloid, T cells, hypoxia, adenosine, TGFbeta and antigen presentation in TCGA. FIG. 39 depicts indications with high myeloid, T cells, hypoxia, adenosine, TGFbeta and antigen presentation in metastatic cancers in MET500 dataset.

[1914] FIGS. 40A-C depict syngeneic mouse models with high T cell, myeloid and stromal infiltration and high adenosine. T cell, myeloid, and stromal cell signatures in the syngeneic model RNAseq TISMO database were assessed using only naïve untreated syngeneic in vivo tumors (FIGS. 40A-C). The expression per model was averaged across the technical or biological replicates. A ranking based scoring was used in this case where a set of genes within a T cell, myeloid and stromal signature was used to generate an average rank based on the ranking of individual genes.

[1915] As the myeloid cell infiltration increases, treatment with the immunostimulatory bacteria provided herein result in higher tumor colonization and anti-tumor efficacy. The high myeloid content (shown by CD68) is coupled with these models also exhibiting high adenosine in the TME given by expression of CD73 i.e., NT5E (FIG. 40C).

[1916] Solid tumor indications with high hypoxia, and TGFbeta promote high adenosine microenvironment and myeloid content. These indications will exhibit high colonization of the immunostimulatory bacteria, such as the STACT bacteria, such as those with a phenotype ΔpurI/ΔmsbB/Δasd/ΔfljB/ΔfliC/ΔpagP/ΔansB/ΔcsgD, in the tumor microenvironment as well as high level of uptake by myeloid cells. This behavior is exhibited in primary as well as metastatic tumors. Tumors include, for example chronic lymphoblastic leukemias (CLLs) and myeloid malignancies. CLL has high adenosine and a hypoxic tumor microenvironment, and myeloid malignancies because they are myeloid cells, which as shown and described herein are infected with the immunostimulatory bacteria provided herein.

[1917] Since modifications will be apparent to those of skill in the art, it is intended that this invention be limited only by the scope of the appended claims.

What is claimed:

1. A method of treating a tumor, comprising:
identifying a subject whose tumor comprises proliferating macrophages; and
administering a therapeutic that delivers a nucleic acid payload into the proliferating macrophages and converts the macrophages into macrophages with an M1/M2 hybrid phenotype.

2. The method of claim 1, wherein the macrophages prior to conversion comprise M2 proliferating macrophages.

3. The method of claim 1, wherein the therapeutic has attenuated TLR2 activity or TLR2 and TLR4 and/or TLR5 activity, whereby production of type I IFN by macrophages that comprise the therapeutic is not inhibited.

4. The method of claim 3, wherein the therapeutic is an immunostimulatory bacterium comprising a plasmid encoding a type I interferon (IFN) or a product that, upon expression, induces type I interferon (IFN) in the macrophages.

5. The method of claim 1, wherein:
the therapeutic is an immunostimulatory bacterium; and
the tumor has one or more of elevated adenosine and/or TGF-beta, relative to a non-tumor tissue, and/or the tumor is hypoxic.

6. The method of claim 1, wherein the cancer is chronic lymphocytic leukemia or a myeloid malignancy.

7. The method of claim 3, wherein:
the therapeutic is an immunostimulatory bacterium;
the immunostimulatory bacterium comprises a plasmid comprising the sequence of nucleotides set forth in SEQ ID NO:501, or degenerative codons thereof in the protein encoding regions, or a sequence having at least 75%, 80%, 90%, 95%, 96%, 97%, 98%, 99%, or more sequence identity to the sequence set forth in SEQ ID NO:501 or to the plasmid comprising one or more degenerate codons;
the plasmid encodes a protein that is an IL-15/IL-15R alpha chain complex or a protein having at least 95% sequence identity thereto; and
the plasmid encodes a chimeric STING that constitutively induces type 1 interferon activity and has lower NF-κB signaling activity compared to human STING or encoding a protein that has at least 95% sequence identity to the chimeric STING and has constitutive activity and lower NF-κB signaling activity compared to human STING.

8. The method of claim 1, wherein:
the therapeutic comprises an immunostimulatory bacterium that is a strain designated as YS1646Δasd/ΔFLG/ΔpagP/ΔansB/ΔcsgD/F-ΔpurI, or YS1646Δasd/ΔFLG/ΔpagP/ΔansB/ΔcsgD/F-ΔpurI/ΔthyA, or YS1646Δasd/ΔFLG/ΔpagP/ΔansB/ΔcsgD;
YS1646 is ΔpurI/ΔmsbB; and
F-ΔpurI is a full deletion of the purI coding region.

9. The method of claim 3, wherein:
the therapeutic comprises an immunostimulatory bacterium that is a strain with the phenotype designated YS1646Δasd/ΔFLG/ΔpagP/ΔansB/ΔcsgD/F-ΔpurI, or YS1646Δasd/ΔFLG/ΔpagP/ΔansB/ΔcsgD/F-ΔpurI/ΔthyA, or YS1646Δasd/ΔFLG/ΔpagP/ΔansB/ΔcsgD;
YS1646 is ΔpurI/ΔmsbB; and
F-ΔpurI is a full deletion of the purI coding region.

10. An immunostimulatory bacterium that is a Salmonella strain; wherein:
the phenotype comprises YS1646Δasd/ΔFLG/ΔpagP/ΔansB/ΔcsgD/F-ΔpurI, or YS1646Δasd/ΔFLG/ΔpagP/ΔansB/ΔcsgD/F-ΔpurI/ΔthyA, or ΔpurI/ΔmsbB/Δasd/ΔFLG/ΔpagP/ΔansB/ΔcsgD;
YS1646 is ΔpurI/ΔmsbB; and
F-ΔpurI is a full deletion of the purI coding region.

11. The immunostimulatory bacterium of claim 10, comprising a
a plasmid that comprises the sequence of nucleotides set forth in SEQ ID NO:501, or degenerative codons thereof in the protein encoding regions, or a sequence having at least 75%, 80%, 90%, 95%, 96%, 97%, 98%, 99%, or more sequence identity to the sequence set forth in SEQ ID NO:501 or to a plasmid comprising one or more degenerate codons, wherein:
the plasmid encodes a protein that is an IL-15/IL-15R alpha chain complex or a protein having at least 95% sequence identity thereto; and
the plasmid encodes a chimeric STING that constitutively induces type 1 interferon activity and has lower NF-κB signaling activity compared to human STING or encoding a protein that has at least 95% sequence identity to the chimeric STING and has constitutive activity and lower NF-κB signaling activity compared to human STING.

12. The immunostimulatory bacterium of claim 10, comprising a plasmid that comprises the sequence of nucleotides set forth as any one of SEQ ID NOs:502-545 and degenerate sequences thereof or comprising a portion thereof that comprises nucleic acid encoding the immunostimulatory protein(s), eukaryotic transcription and/or translational regulatory sequences, or sequences having at least 95% sequence identity with the coding portions and regulatory regions of SEQ ID NOs:502-545.

13. A method of converting a T-cell excluded tumor into a T-cell infiltrated tumor, comprising administering a therapeutic to a subject identified has having a T-cell excluded tumor, wherein the therapeutic comprises:
a delivery vehicle that has attenuated TLR2 or TLR2/TLR4, and/or TLR5 activity, whereby production of type I IFN by macrophages that comprise the therapeutic is not inhibited by activation of TLR2 activity; and
nucleic acid encoding at least two different immunostimulatory proteins, wherein one protein induces type I IFN when introduced into macrophages, and the other stimulates anti-viral or anti-cancer immune responses.

14. A method for identifying subjects likely to or predicted to respond to treatment with a therapeutic that comprises a delivery vehicle containing non-integrating nucleic acid encoding one or more immunostimulatory proteins, the method comprising detecting proliferating macrophages or detecting particular markers in a tumor or body fluid sample, wherein:
response to treatment and/or proliferating macrophages is/are identified by a combination of markers selected from among markers detectable by immunohistochemistry (IHC) and genetic markers for a particular tumor type; and
the combinations of markers detectable by IHC and genetic markers for tumor types are selected from:
SPP1⁺ and NRF2 pathway alterations in a tumor biopsy or body fluid sample from a subject with a squamous carcinoma(s);
SPP1⁺ and TP53 mutations in breast cancer (BRCA);
SPP1⁺ and PI3K mutations in prostate cancer (PRAD);
SPP1⁺ and BRAF mutations in skin cutaneous melanoma (SKCM);
C1QC⁺ and HIPPO pathway mutations;
C1QC⁺ in uterine corpus endometrial cancer (UCEC);
C1QC⁺ and KMT2A mutations in bladder cancer (BLCA); and
C1QC⁺ and TP53 pathway mutations in breast cancer (BRCA).

15. A method of identifying therapeutics that convert macrophages to an M1/M2 phenotype, comprising:
a) preparing one or more candidate therapeutics that comprise a delivery vehicle and nucleic acid encoding immunostimulatory proteins, wherein one of the immunostimulatory proteins induces an anti-viral or anti-cancer immune response, and the other induces type I IFN, and the delivery vehicle is TLR2 or TLR4, or TLR2 and TLR4 or 5, or TLR2/4/5 attenuated, whereby the therapeutic does not inhibit type I IFN in macrophages when introduced into or that infect the macrophages;
b) introducing the candidate therapeutic(s) into proliferating macrophages;
c) determining the phenotype of the resulting macrophages; and
d) selecting a candidate therapeutic(s) if the resulting macrophages have a M1/M2 hybrid phenotype.

16. The method of claim 15, wherein the macrophage(s) is/are converted to an M1/M2 phenotype; and an M1/M2 hybrid phenotype is identified by markers that comprise: at least two of any the following markers:
Hybrid Markers (lower than M2, higher than M1): SPP1, CD209, CD206; and
Induced Markers: MERTK, C1QC, IFN-α2a, IFNβ1, CXCL10, 4-1BBL (TNFSF9), and MYC.

17. The method of claim 15, wherein:
the macrophages comprise M1 and M2 markers whose levels change post-treatment to levels indicative of an M1/M2 hybrid phenotype as follows: M1 phenotype markers CD80, CD86, CCR7, CXCL10 and CXCL11 are upregulated compared to pre-treatment levels, M2 phenotype markers CD206 and CD209 are downregulated relative to M2 macrophages but upregulated relative to M1 macrophage phenotype markers, and M1 and M2 markers CD14, CD68, and CD163 are upregulated post-treatment; or
markers post-treatment that are upregulated in the resulting macrophages are co-stimulatory molecules CD80, CD86, chemokine signaling CCR7, CXCL10, CXCL11; PRRs (pattern recognition receptors), which are upregulated relative to M1, downregulated relative to M2 macrophage, CD206, CD209; and scavenger receptors upregulated CD68, CD163.

18. The method of claim 1, wherein proliferating macrophages are identified by:
a) the presence of biopsy surface markers: CD68+KI67 and/or PCNA, MERTK, and/or by gene expression of the G2M module, where half or more than half (≥ or >14 genes of the set) are expressed, and optionally STMN1 is expressed; and/or
b) tumor gene expression of >14 genes of the G2M module and Stathmin1 (STMN1); and/or
c) the markers CD68, MERTK, and K167 and/or PCNA; and/or
d) biopsy surface markers: CD68+KI67 and/or PCNA, MERTK;
e) SPP1 in lung or gastric tumor; and/or
f) C1QC in colon or breast tumors.

19. A method of increasing the therapeutic effect of an immunostimulatory bacterium in a subject, comprising:
pre-treating the subject with anti-PD-1 antibody or other PD-1 antagonist to suppress PD-1 expression on macrophages in the tumor of the subject to thereby promote their phagocytic capacity;
administering the immunostimulatory bacterium, wherein the bacterium encodes one or more immunostimulatory protein(s); and
then, after a sufficient time so that the nucleic acid encoding the payload(s) is delivered to the macrophages, treating with an anti-PD-L1 agent.

20. The method of claim 19, wherein the treated subject is an immediate non-responder to the anti-PD-1 therapeutic, or the subject initially was responsive to the anti-PD-1 therapeutic, but became non-responsive following or during treatment.

21. A method of a treating a subject having or at risk of having a benign nervous system tumor, the method comprising administering to the subject a therapeutically effective amount of a composition comprising a bacterium comprising the phenotype YS1646/ΔFLG/ΔpagP/ΔcsgD or YS1646Δasd/ΔFLG/ΔpagP/ΔansB/ΔcsgD or YS1646Δasd/ΔFLG/ΔpagP/ΔcsgD or YS1646/ΔFLG/ΔpagP/ΔansB/ΔcsgD, optionally in combination with an immune checkpoint inhibitor and/or angiogenesis inhibitor, wherein the bacterium optionally encodes at least two anti-cancer therapeutic products.

22. The method of claim 1, wherein:
the therapeutic comprises an immunostimulatory bacterium; and
the bacterium is a gram positive bacterium.

23. The method of claim 1, wherein:
the therapeutic comprises an immunostimulatory bacterium; and
bacterium is a strain of Shigella, E coli, Listeria, or Salmonella.

24. The method of claim 1, wherein the immunostimulatory bacterium is a Salmonella typhimurium strain.

25. The immunostimulatory bacterium of claim 10, comprising a plasmid encoding a bi-specific T-cell engager antibody that binds DLL3 and CD3, wherein the bi-specific T-cell engager antibody comprises combinations of a)-f), whereby the resulting construct can bind to each of DLL3 and CD3:
a) a light chain that comprises amino acid residues 154-260 of SEQ ID NO: 487, or a humanized variant thereof, or a variant having at least 95% sequence identity thereto; and
b) a heavy chain that comprises the sequence of amino acid residues set forth as amino acid residues 22-138 of SEQ ID NO: 487, or a humanized variant thereof, or a variant having at least 95% sequence identity thereto; and
c) a light chain that comprises a sequence of amino acid residues set forth as amino acid residues 155-261 of SEQ ID NO: 489, or a humanized variant thereof, or a variant having at least 95% sequence identity thereto; and
d) a heavy chain that comprises a sequence of amino acid residues set forth as amino acid residues 22-139 of SEQ ID NO: 489, or a humanized variant thereof, or a variant having at least 95% sequence identity thereto; and
e) a heavy and light chain, wherein:
the light chain comprises a sequence of amino acid residues set forth as amino acid residues 155-261 of SEQ ID NO: 485, or a humanized variant thereof, or a variant having at least 95% sequence identity thereto; and
the heavy chain comprises a sequence of amino acid residues set forth as amino acid residues 22-139 of SEQ ID NO: 485, or a humanized variant thereof, or a variant having at least 95% sequence identity thereto; and
f) a heavy and light chain of an anti-CD3 antibody, wherein:
the light chain of the anti-CD3 antibody comprises a sequence of amino acid residues set forth as amino acid residues 398-504 of SEQ ID NO: 485, or a humanized variant thereof, or a variant having at least 95% sequence identity thereto, or a humanized variant thereof, or a variant having at least 95% sequence identity thereto; and
the heavy chain of the anti-CD3 antibody comprises a sequence of amino acid residues set forth as amino acid residues 267-382 of SEQ ID NO: 485, or a humanized variant thereof, or a variant having at least 95% sequence identity thereto.

26. The immunostimulatory bacterium of claim 10, wherein the therapeutic comprises nucleic acid encoding a tumor-associated antigen.

27. The immunostimulatory bacterium of claim 26, wherein the tumor-associated antigen is an oncofetal antigen, an oncoviral antigen, an overexpressed/accumulated antigen, a cancer-testis antigen, a linear restricted antigen, a mutated antigen, a post-translationally altered antigen, or an idiotypic antigen.

28. The immunostimulatory bacterium of claim 27, wherein:
the oncofetal antigen is Carcinoembryonic antigen (CEA), immature laminin receptor, or tumor-associated glycoprotein 72 (TAG-72);
the oncoviral antigen is HPVE E6 or HPVE7;
the overexpressed/accumulated antigen is BING-4, epidermal growth factor receptor (EGFR), Wilms' tumor protein, calcium-activated chloride channel 2, cyclin-B1, 9D7, delta-like ligand 3 (DLL3), epithelial cell adhesion molecule (EpCAM), ephrin type-A receptor 3 (EphA3), human epidermal growth factor receptor 2 (HER2/Neu), telomerase, mesothelin, stomach-cancer-associated protein tyrosine phosphatase 1 (SAP-1), or survivin;
the cancer-testis antigen is BAGE (B melanoma antigen) family, CAGE (cancer/testis antigen) family, GAGE (G antigen 1) family, MAGE (melanoma antigen) family, SAGE (sarcoma antigen) family, PAGE (P-antigen) family, XAGE (X-antigen) family, CT9, CT10, New York esophageal squamous cell carcinoma 1 (NY-ESO-1), LAGE-1, preferentially expressed antigen in melanoma (PRAME), or synovial sarcoma/X breakpoint 2 (SSX-2);
lineage-restricted antigen is Melanoma antigen recognized by T-cells 1 (Melan-A/MART-1), gp100/Pmel17, tyrosinase, tyrosinase related protein (TRP)-1, TRP-2, P. Polypeptide, melanocortin 1 receptor (MC1R), or prostate-specific antigen (PSA);
the mutated antigen is β-catenin, BRCA1, BRCA2, cyclin dependent kinase 4 (CDK4), chronic myelogenous leukemia tumor antigen 66 (CML66), fibronectin, melanoma antigen recognized by T-cells 2, (MART-2), p53, Ras, or TGF-β receptor type II (TGF-βRII);
the post-translationally altered antigen is mucin 1 cell surface associated antigen (MUC1); and
the idiotypic antigen is Immunoglobulin (Ig), T-cell Receptor (TCR).

29. The method of claim 1, wherein the therapeutic comprises nucleic acid that encodes one or more of the following combinations of therapeutic products:
IL-2 and IL-12p70;
IL-2 and IL-21;
IL-2, IL-12p70, and a STING GOF variant;
IL-2, IL-21, and a STING GOF variant;
IL-2, IL-12p70, a STING GOF variant, and 4-1BBL (including 4-1BBLΔcyt), where Δcyt is a deleted cytoplasmic domain;
IL-2, IL-21, a STING GOF variant, and 4-1BBL (including 4-1BBLΔcyt);
IL-15/IL-15Rα, and a STING GOF variant;
IL-15/IL-15Rα, a STING GOF variant, and 4-1BBL (including 4-1BBLΔcyt);
IL-15/IL-15Rα and IL-12p70;
IL-15/IL-15Rα and IL-21;
IL-15/IL-15Rα, IL-12p70, and a STING GOF variant;
IL-15/IL-15Rα, IL-21, and a STING GOF variant;
IL-15/IL-15Rα, IL-12p70, a STING GOF variant, and 4-1BBL (including 4-1BBLΔcyt);
IL-15/IL-15Rα, IL-21, a STING GOF variant, and 4-1BBL (including 4-1BBLΔcyt);
IL-12p70 and IL-21;
IL-12p70, IL-21, and a STING GOF variant;
IL-12p70, IL-21, a STING GOF variant, and 4-1BBL (including 4-1BBLΔcyt);
IL-12p70 and a STING GOF variant;
IL-12p70, a STING GOF variant, and 4-1BBL (including 4-1BBLΔcyt);
IL-12p70 and IL-18;
IL-12p70, IL-18, and a STING GOF variant;
IL-12p70, IL-18, a STING GOF variant, and 4-1BBL (including 4-1BBLΔcyt);
a TGF-β decoy receptor, IL-2, and IL-12p70;
a TGF-β decoy receptor, IL-2, and IL-21;
a TGF-β decoy receptor, IL-2, IL-12p70, and a STING GOF variant;
a TGF-β decoy receptor, IL-2, IL-21, and a STING GOF variant;
a TGF-β decoy receptor, IL-2, IL-12p70, a STING GOF variant, and 4-1BBL (including 4-1BBLΔcyt);
a TGF-β decoy receptor, IL-2, IL-21, a STING GOF variant, and 4-1BBL (including 4-1BBLΔcyt);
a TGF-β decoy receptor, IL-15/IL-15Rα, and a STING GOF variant;
a TGF-β decoy receptor, IL-15/IL-15Rα, a STING GOF variant, and 4-1BBL (including 4-1BBLΔcyt);
a TGF-β decoy receptor, IL-15/IL-15Rα, and IL-12p70;
a TGF-β decoy receptor, IL-15/IL-15Rα, and IL-21;
a TGF-β decoy receptor, IL-15/IL-15Rα, IL-12p70, and a STING GOF variant;
a TGF-β decoy receptor, IL-15/IL-15Rα, IL-21, and a STING GOF variant;
a TGF-β decoy receptor, IL-15/IL-15Rα, IL-12p70, a STING GOF variant, and 4-1BBL (including 4-1BBLΔcyt);
a TGF-β decoy receptor, IL-15/IL-15Rα, IL-21, a STING GOF variant, and 4-1BBL (including 4-1BBLΔcyt);
a TGF-β decoy receptor, IL-12p70, and IL-21;
a TGF-β decoy receptor, IL-12p70, IL-21, and a STING GOF variant;
a TGF-β decoy receptor, IL-12p70, IL-21, a STING GOF variant, and 4-1BBL (including 4-1BBLΔcyt);
a TGF-β decoy receptor and IL-12p70;
a TGF-β decoy receptor, IL-12p70, and a STING GOF variant;
a TGF-β decoy receptor, IL-12p70, a STING GOF variant, and 4-1BBL (including 4-1BBLΔcyt);
a TGF-β decoy receptor, IL-12p70, and IL-18;
a TGF-β decoy receptor, IL-12p70, IL-18, and a STING GOF variant;
a TGF-β decoy receptor, IL-12p70, IL-18, a STING GOF variant, and 4-1BBL (including 4-1BBLΔcyt);
a TGF-β decoy receptor and a STING GOF variant;
an anti-CTLA-4 antibody, IL-2, and IL-12p70;
an anti-CTLA-4 antibody, IL-2, and IL-21;
an anti-CTLA-4 antibody, IL-2, IL-12p70, and a STING GOF variant;
an anti-CTLA-4 antibody, IL-2, IL-21, and a STING GOF variant;
an anti-CTLA-4 antibody, IL-2, IL-12p70, a STING GOF variant, and 4-1BBL (including 4-1BBLΔcyt);
an anti-CTLA-4 antibody, IL-2, IL-21, a STING GOF variant, and 4-1BBL (including 4-1BBLΔcyt);
an anti-CTLA-4 antibody, IL-15/IL-15Rα, and a STING GOF variant;
an anti-CTLA-4 antibody, IL-15/IL-15Rα, a STING GOF variant, and 4-1BBL (including 4-1BBLΔcyt);
an anti-CTLA-4 antibody, IL-15/IL-15Rα, and IL-12p70;
an anti-CTLA-4 antibody, IL-15/IL-15Rα, and IL-21;
an anti-CTLA-4 antibody, IL-15/IL-15Rα, IL-12p70, and a STING GOF variant;
an anti-CTLA-4 antibody, IL-15/IL-15Rα, IL-21, and a STING GOF variant;
an anti-CTLA-4 antibody, IL-15/IL-15Rα, IL-12p70, a STING GOF variant, and 4-1BBL (including 4-1BBLΔcyt);
an anti-CTLA-4 antibody, IL-15/IL-15Rα, IL-21, a STING GOF variant, and 4-1BBL (including 4-1BBLΔcyt);
an anti-CTLA-4 antibody, IL-12p70, and IL-21;
an anti-CTLA-4 antibody, IL-12p70, IL-21, and a STING GOF variant;
an anti-CTLA-4 antibody, IL-12p70, IL-21, a STING GOF variant, and 4-1BBL (including 4-1BBLΔcyt);
an anti-CTLA-4 antibody and IL-12p70;
an anti-CTLA-4 antibody, IL-12p70, and a STING GOF variant;
an anti-CTLA-4 antibody, IL-12p70, a STING GOF variant, and 4-1BBL (including 4-1BBLΔcyt);
an anti-CTLA-4 antibody, IL-12p70, and IL-18;
an anti-CTLA-4 antibody, IL-12p70, IL-18, and a STING GOF variant;
an anti-CTLA-4 antibody, IL-12p70, IL-18, a STING GOF variant, and 4-1BBL (including 4-1BBLΔcyt);
an anti-CTLA-4 antibody and a STING GOF variant;
a CD40 agonist, IL-2, and IL-12p70;
a CD40 agonist, IL-2, and IL-21;
a CD40 agonist, IL-2, IL-12p70, and a STING GOF variant;
a CD40 agonist, IL-2, IL-21, and a STING GOF variant;
a CD40 agonist, IL-2, IL-12p70, a STING GOF variant, and 4-1BBL (including 4-1BBLΔcyt);
a CD40 agonist, IL-2, IL-21, a STING GOF variant, and 4-1BBL (including 4-1BBLΔcyt);
a CD40 agonist, IL-15/IL-15Rα, and a STING GOF variant;
a CD40 agonist, IL-15/IL-15Rα, a STING GOF variant, and 4-1BBL (including 4-1BBLΔcyt);
a CD40 agonist, IL-15/IL-15Rα, and IL-12p70;
a CD40 agonist, IL-15/IL-15Rα, and IL-21;
a CD40 agonist, IL-15/IL-15Rα, IL-12p70, and a STING GOF variant;
a CD40 agonist, IL-15/IL-15Rα, IL-21, and a STING GOF variant;
a CD40 agonist, IL-15/IL-15Rα, IL-12p70, a STING GOF variant, and 4-1BBL (including 4-1BBLΔcyt);
a CD40 agonist, IL-15/IL-15Rα, IL-21, a STING GOF variant, and 4-1BBL (including 4-1BBLΔcyt);
a CD40 agonist, IL-12p70, and IL-21;
a CD40 agonist, IL-12p70, IL-21, and a STING GOF variant;
a CD40 agonist, IL-12p70, IL-21, a STING GOF variant, and 4-1BBL (including 4-1BBLΔcyt);
a CD40 agonist and IL-12p70;**
a CD40 agonist, IL-12p70, and a STING GOF variant;
a CD40 agonist, IL-12p70, a STING GOF variant, and 4-1BBL (including 4-1BBLΔcyt);
a CD40 agonist, IL-12p70, and IL-18;
a CD40 agonist, IL-12p70, IL-18, and a STING GOF variant;
a CD40 agonist, IL-12p70, IL-18, a STING GOF variant, and 4-1BBL (including 4-1BBLΔcyt);
a CD40 agonist and a STING GOF variant;
a bi-specific T-cell engager (BiTe)+a STING protein, a BiTe+IL-15, a BiTe+IL-15+a STING protein, where the BiTe targets DLL3, EGFR, Her2, CEA, Mesothelin, PSMA, EpCAM, CD74, Folate Receptor, Nectin4, EphA2, CA-IX, B7H3, Siglec-15, Muc1, or Lewis Y antigen;
a tumor antigen(s)+STING gain-of-function variant;
a therapeutic composition of a tumor antigen(s) and IL-15;
a therapeutic composition of a tumor antigen(s)+IL-15+a STING gain-of-function variant;
one or more antigens and an IFN;
one or more antigens and an IFNα;
one or more antigens, and IFNα2 or an IFNα1-16;
one or more antigens and any of IFNα1-16;
one or more antigens and IFN-β;
one or more antigens, IFNα2, and IFN-β;
one or more antigens and an IRF3 GOF variant with the mutation S396D;
one or more antigens, IFNα2 or an IFNα1-16, and an IRF3 GOF variant with the mutation S396D;
two different interferon type I proteins;
an interferon-a and/or an interferon-b;
IFNalpha2+IRF3-S396D;
IFNα1-16+IRF3-S396D;
IFNalpha2+IFN-beta;
IFNα1-16+IFN-beta
FLT-3L, or sialidase, or IL-12p35, or Azurin, or a membrane anchored IL-2, IL-12, IL-12p35, IL-21, IL-15, FLT-3L, alone or in combination with other immunostimulatory proteins; and
a TLR8 agonist, where the agonist is polyU or polyU/G, a microRNA, or miR-21, alone or in combination with any of the immunostimulatory proteins.

30. A plasmid, comprising the sequence of nucleotides set forth in SEQ ID NO:501, or degenerative codons thereof in the protein encoding regions, or a sequence having at least 75%, 80%, 90%, 95%, 96%, 97%, 98%, 99%, or more sequence identity to the sequence set forth in SEQ ID NO:501 or to a plasmid comprising one or more degenerate codons, wherein:
the plasmid encodes a protein that is an IL-15/IL-15R alpha chain complex or a protein having at least 95% sequence identity thereto; and
the plasmid encodes a chimeric STING that constitutively induces type 1 interferon activity and has lower NF-κB signaling activity compared to human STING or encoding a protein that has at least 95% sequence identity to the chimeric STING and has constitutive activity and lower NF-κB signaling activity compared to human STING.

31. The plasmid of claim 30, comprising the sequence of nucleotides set forth in SEQ ID NO:501 or a nucleic acid molecule with degenerate codons, or a sequence having at least 90% or 95% or 97% or 98% or 99% or more sequence identity to SEQ ID NO:501, or a nucleic acid molecule comprising one or more degenerate codons to either SEQ ID NO:501 or the sequence having at least 90% or 95% or 97% or 98% or 99% or more sequence identity to SEQ ID NO:501.

32. The immunostimulatory bacterium of claim 10, comprising a plasmid, wherein:
the plasmid comprises the sequence of nucleotides set forth as SEQ ID NOs:502-545 and degenerate sequences thereof or comprising a portion thereof that comprises nucleic acid encoding the immunostimulatory protein(s), eukaryotic transcription and/or translational regulatory sequences, or sequences having at least 95% sequence identity with the coding portions and regulatory regions of SEQ ID NOs:502-545; and
the immunostimulatory bacterium is a Salmonella strain comprises the phenotype:
YS1646Δasd/ΔFLG/ΔpagP/ΔansB/ΔcsgD/F-ΔpurI, or
YS1646Δasd/ΔFLG/ΔpagP/ΔansB/ΔcsgD, or
YS1646Δasd/ΔFLG/ΔpagP/ΔansB/ΔcsgD/F-ΔpurI/ΔthyA;
YS1646 is ΔmsbB/ΔpurI; and
F-ΔpurI denotes a strain in which purI is deleted.

33. An anti-cancer treatment protocol, comprising:
a) pre-treating a subject to be treated with the delivery vehicle with an agent that suppresses PD-1 expression on macrophages to thereby promote the phagocytic capacity of the macrophage, wherein:
the delivery vehicle comprises nucleic acid encoding an anti-cancer product; and
the delivery vehicle targets or can be phagocytosed by phagocytic macrophages; and
then administering the delivery vehicle; or
b) pre-treating a subject to be treated with the delivery vehicle with an anti-PD-1 agent, whereby PD-1 expression on the macrophages is suppressed to thereby promote phagocytic capacity of the macrophages, wherein the delivery vehicle comprises nucleic acid encoding an anti-cancer product and is a vehicle that targets or can be phagocytosed by phagocytic macrophages; and
then administering the delivery vehicle.

34. The protocol of claim 33, wherein:
the anti-PD-1 agent is administered a pre-determined time before the delivery vehicle; and
the predetermined time is at least 12 hours, 24 hours, 36 hours, 48 hours, or longer.

35. The protocol of claim 33, further comprising, after the anti-cancer product encoded in the delivery vehicle is expressed so that PD-L1 is induced on the macrophages, then administering an anti-PD-L1 agent.

36. The protocol of claim 33, wherein the delivery vehicle is bacterium is a bacterium that is YS1646Δasd/ΔFLG/ΔpagP/ΔansB/ΔcsgD/F-ΔpurI or YS1646Δasd/ΔFLG/ΔpagP/ΔansB/ΔcsgD containing a plasmid encoding IL-15/IL-15R alpha chain complex and a chimeric STING with the CTT from Tasmanian devil and the replacement N154S/R284G or a derivative thereof that has additional genome modifications, wherein YS1646 is ΔmsbB/ΔpurI, and F-ΔpurI denotes a strain in which purI is deleted, and comprises:
administering an anti-PD-1 antibody;
then administering the bacterium;
then administering an immunotherapy; and
the time periods between each step optionally can be pre-determined, such as a predetermined time that is at least 4 hours, 5 hours, 6 hours, 7 hours, 8 hours, 9 hours, 10 hours, 12 hours, 14 hours, 16 hours, 18 hours, 20 hours, 22 hours, 24 hours, 1 day to 2 days, or up to 72 hours, or 8 to 12 hours, or 8 to 24 hours, or 8 to 48 hours, or 12 to 24 hours or 12 to 30 hours.

37. A method of treating a subject who has an immune desert or T-cell excluded tumor, comprising:
first administering an agent that suppresses PD-1 expression on macrophages, whereby phagocytic capacity of the macrophages is increased relative to before treatment; and
then after a pre-determined time of at least 4 hours, administering a delivery vehicle that comprises nucleic acid encoding an anti-cancer product, where the delivery vehicle targets or accumulates in phagocytic macrophages.

38. The method of claim 37, wherein the pre-determined time is sufficient for suppression of PD-1 expression on the macrophages.

39. The method of claim 38, further comprising, after a pre-determined second time period of at least 4 hours, administering immunotherapy to the subject.

40. The method of claim 39, wherein the immunotherapy comprises administering a checkpoint inhibitor.

The application's sequence listing, which the Patent Office published only in electronic form, follows.

SEQUENCE LISTING (566 sequences)

SEQ ID NO: 1 - DNA, 19 bp, Homo sapiens
  misc_feature 1..19: note = Human PD-L1 shRNA target 1
  source 1..19: mol_type = genomic DNA
gtagagtatggtagcaata

SEQ ID NO: 2 - DNA, 19 bp, Homo sapiens
  misc_feature 1..19: note = Human PD-L1 shRNA target 2
  source 1..19: mol_type = genomic DNA
gccgactacaagcgaatta

SEQ ID NO: 3 - DNA, 19 bp, Homo sapiens
  misc_feature 1..19: note = Human PD-L1 shRNA target 3
  source 1..19: mol_type = genomic DNA
gacaagcagtgaccatcaa

SEQ ID NO: 4 - DNA, 19 bp, Homo sapiens
  misc_feature 1..19: note = Human PD-L1 shRNA target 4
  source 1..19: mol_type = genomic DNA
gaatcaacacaacaactaa

SEQ ID NO: 5 - DNA, 19 bp, Homo sapiens
  misc_feature 1..19: note = Human PD-L1 shRNA target 5
  source 1..19: mol_type = genomic DNA
gcacatcctccaaatgaaa

SEQ ID NO: 6 - DNA, 19 bp, Homo sapiens
  misc_feature 1..19: note = Human PD-L1 shRNA target 6
  source 1..19: mol_type = genomic DNA
gtagcactgacattcatct

SEQ ID NO: 7 - DNA, 19 bp, Homo sapiens
  misc_feature 1..19: note = Human CTNNB1 shRNA target 1
  source 1..19: mol_type = genomic DNA
gacagactgccttcaaatt

SEQ ID NO: 8 - DNA, 19 bp, Homo sapiens
  misc_feature 1..19: note = Human CTNNB1 shRNA target 2
  source 1..19: mol_type = genomic DNA
gcagctggaattctttcta

SEQ ID NO: 9 - DNA, 19 bp, Homo sapiens
  misc_feature 1..19: note = Human CTNNB1 shRNA target 3
  source 1..19: mol_type = genomic DNA
gactaccagttgtggttaa

SEQ ID NO: 10 - DNA, 19 bp, Homo sapiens
  misc_feature 1..19: note = Human CTNNB1 shRNA target 4
  source 1..19: mol_type = genomic DNA
ggacacagcagcaatttgt

SEQ ID NO: 11 - DNA, 19 bp, Homo sapiens
  misc_feature 1..19: note = Human CTNNB1 shRNA target 5
  source 1..19: mol_type = genomic DNA
ggatgttcacaaccgaatt

SEQ ID NO: 12 - DNA, 19 bp, Homo sapiens
  misc_feature 1..19: note = Human CTNNB1 shRNA target 6
  source 1..19: mol_type = genomic DNA
gccacaagattacaagaaa

SEQ ID NO: 13 - DNA, 19 bp, Homo sapiens
  misc_feature 1..19: note = Human SIRP-alpha shRNA target 1
  source 1..19: mol_type = genomic DNA
gccaggtgaggaagttcta

SEQ ID NO: 14 - DNA, 19 bp, Homo sapiens
  misc_feature 1..19: note = Human SIRP-alpha shRNA target 2
  source 1..19: mol_type = genomic DNA
gagctggctcctggtgaat

SEQ ID NO: 15 - DNA, 19 bp, Homo sapiens
  misc_feature 1..19: note = Human SIRP-alpha shRNA target 3
  source 1..19: mol_type = genomic DNA
gctgagaacactggatcta

SEQ ID NO: 16 - DNA, 19 bp, Homo sapiens
  misc_feature 1..19: note = Human SIRP-alpha shRNA target 4
  source 1..19: mol_type = genomic DNA
gaagaatgccagagaaata

SEQ ID NO: 17 - DNA, 19 bp, Homo sapiens
  misc_feature 1..19: note = Human SIRP-alpha shRNA target 5
  source 1..19: mol_type = genomic DNA
ggacacaaatgatatcaca

SEQ ID NO: 18 - DNA, 19 bp, Homo sapiens
  misc_feature 1..19: note = Human SIRP-alpha shRNA target 6
  source 1..19: mol_type = genomic DNA
ggagtatgccagcattcag

SEQ ID NO: 19 - DNA, 19 bp, Homo sapiens
  misc_feature 1..19: note = Human Trex1 shRNA target 1
  source 1..19: mol_type = genomic DNA
gcagcgcatgggcgtcaat

SEQ ID NO: 20 - DNA, 19 bp, Homo sapiens
  misc_feature 1..19: note = Human Trex1 shRNA target 2
  source 1..19: mol_type = genomic DNA
ggcccaaggaagagctata

SEQ ID NO: 21 - DNA, 19 bp, Homo sapiens
  misc_feature 1..19: note = Human Trex1 shRNA target 3
  source 1..19: mol_type = genomic DNA
gcaccatcaggcccatgta

SEQ ID NO: 22 - DNA, 19 bp, Homo sapiens
  misc_feature 1..19: note = Human Trex1 shRNA target 4
  source 1..19: mol_type = genomic DNA
gccacaaccaggaacacta

SEQ ID NO: 23 - DNA, 19 bp, Homo sapiens
  misc_feature 1..19: note = Human Trex1 shRNA target 5
  source 1..19: mol_type = genomic DNA
gcaggggtaccaaggatct

SEQ ID NO: 24 - DNA, 19 bp, Homo sapiens
  misc_feature 1..19: note = Human Trex1 shRNA target 6
  source 1..19: mol_type = genomic DNA
gccacactgtatggactat

SEQ ID NO: 25 - DNA, 19 bp, Homo sapiens
  misc_feature 1..19: note = Human VISTA shRNA target 1
  source 1..19: mol_type = genomic DNA
gatgtgaccttctacaaga

SEQ ID NO: 26 - DNA, 19 bp, Homo sapiens
  misc_feature 1..19: note = Human VISTA shRNA target 2
  source 1..19: mol_type = genomic DNA
gaccaccatggcaacttct

SEQ ID NO: 27 - DNA, 19 bp, Homo sapiens
  misc_feature 1..19: note = Human VISTA shRNA target 3
  source 1..19: mol_type = genomic DNA
ggtgcagacaggcaaagat

SEQ ID NO: 28 - DNA, 19 bp, Homo sapiens
  misc_feature 1..19: note = Human VISTA shRNA target 4
  source 1..19: mol_type = genomic DNA
gtgcctgcatcgtaggaat

SEQ ID NO: 29 - DNA, 19 bp, Homo sapiens
  misc_feature 1..19: note = Human VISTA shRNA target 5
  source 1..19: mol_type = genomic DNA
gcaacattcaagggattga

SEQ ID NO: 30 - DNA, 19 bp, Homo sapiens
  misc_feature 1..19: note = Human VISTA shRNA target 6
  source 1..19: mol_type = genomic DNA
gtccctgactctccaaact

SEQ ID NO: 31 - DNA, 870 bp, Homo sapiens
  misc_feature 1..870: note = programmed death-ligand 1 (PD-L1), isoform 1
  source 1..870: mol_type = genomic DNA
atgaggatatttgctgtctttatattcatgacctactggcatttgctgaacgcatttactgtcacggttcccaaggacctatatgtggtagagtatggtagcaatatgacaattgaatgcaaattcccagtagaaaaacaattagacctggctgcactaattgtctattgggaaatggaggataagaacattattcaatttgtgcatggagaggaagacctgaaggttcagcatagtagctacagacagagggcccggctgttgaaggaccagctctccctgggaaatgctgcacttcagatcacagatgtgaaattgcaggatgcaggggtgtaccgctgcatgatcagctatggtggtgccgactacaagcgaattactgtgaaagtcaatgccccatacaacaaaatcaaccaaagaattttggttgtggatccagtcacctctgaacatgaactgacatgtcaggctgagggctaccccaaggccgaagtcatctggacaagcagtgaccatcaagtcctgagtggtaagaccaccaccaccaattccaagagagaggagaagcttttcaatgtgaccagcacactgagaatcaacacaacaactaatgagattttctactgcacttttaggagattagatcctgaggaaaaccatacagctgaattggtcatcccagaactacctctggcacatcctccaaatgaaaggactcacttggtaattctgggagccatcttattatgccttggtgtagcactgacattcatcttccgtttaagaaaagggagaatgatggatgtgaaaaaatgtggcatccaagatacaaactcaaagaagcaaagtgatacacatttggaggagacg

SEQ ID NO: 32 - DNA, 2343 bp, Homo sapiens
  misc_feature 1..2343: note = CTNNB1 (Beta-catenin), isoform 1
  source 1..2343: mol_type = genomic DNA
atggctactcaagctgatttgatggagttggacatggccatggaaccagacagaaaagcggctgttagtcactggcagcaacagtcttacctggactctggaatccattctggtgccactaccacagctccttctctgagtggtaaaggcaatcctgaggaagaggatgtggatacctcccaagtcctgtatgagtgggaacagggattttctcagtccttcactcaagaacaagtagctgatattgatggacagtatgcaatgactcgagctcagagggtacgagctgctatgttccctgagacattagatgagggcatgcagatcccatctacacagtttgatgctgctcatcccactaatgtccagcgtttggctgaaccatcacagatgctgaaacatgcagttgtaaacttgattaactatcaagatgatgcagaacttgccacacgtgcaatccctgaactgacaaaactgctaaatgacgaggaccaggtggtggttaataaggctgcagttatggtccatcagctttctaaaaaggaagcttccagacacgctatcatgcgttctcctcagatggtgtctgctattgtacgtaccatgcagaatacaaatgatgtagaaacagctcgttgtaccgctgggaccttgcataacctttcccatcatcgtgagggcttactggccatctttaagtctggaggcattcctgccctggtgaaaatgcttggttcaccagtggattctgtgttgttttatgccattacaactctccacaaccttttattacatcaagaaggagctaaaatggcagtgcgtttagctggtgggctgcagaaaatggttgccttgctcaacaaaacaaatgttaaattcttggctattacgacagactgccttcaaattttagcttatggcaaccaagaaagcaagctcatcatactggctagtggtggaccccaagctttagtaaatataatgaggacctatacttacgaaaaactactgtggaccacaagcagagtgctgaaggtgctatctgtctgctctagtaataagccggctattgtagaagctggtggaatgcaagctttaggacttcacctgacagatccaagtcaacgtcttgttcagaactgtctttggactctcaggaatctttcagatgctgcaactaaacaggaagggatggaaggtctccttgggactcttgttcagcttctgggttcagatgatataaatgtggtcacctgtgcagctggaattctttctaacctcacttgcaataattataagaacaagatgatggtctgccaagtgggtggtatagaggctcttgtgcgtactgtccttcgggctggtgacagggaagacatcactgagcctgccatctgtgctcttcgtcatctgaccagccgacaccaagaagcagagatggcccagaatgcagttcgccttcactatggactaccagttgtggttaagctcttacacccaccatcccactggcctctgataaaggctactgttggattgattcgaaatcttgccctttgtcccgcaaatcatgcacctttgcgtgagcagggtgccattccacgactagttcagttgcttgttcgtgcacatcaggatacccagcgccgtacgtccatgggtgggacacagcagcaatttgtggagggggtccgcatggaagaaatagttgaaggttgtaccggagcccttcacatcctagctcgggatgttcacaaccgaattgttatcagaggactaaataccattccattgtttgtgcagctgctttattctcccattgaaaacatccaaagagtagctgcaggggtcctctgtgaacttgctcaggacaaggaagctgcagaagctattgaagctgagggagccacagctcctctgacagagttacttcactctaggaatgaaggtgtggcgacatatgcagctgctgttttgttccgaatgtctgaggacaagccacaagattacaagaaacggctttcagttgagctgaccagctctctcttcagaacagagccaatggcttggaatgagactgctgatcttggacttgatattggtgcccagggagaaccccttggatatcgccaggatgatcctagctatcgttcttttcactctggtggatatggccaggatgccttgggtatggaccccatgatggaacatgagatgggtggccaccaccctggtgctgactatccagttgatgggctgccagatctggggcatgcccaggacctcatggatgggctgcctccaggtgacagcaatcagctggcctggtttgatactgacctg

SEQ ID NO: 33 - DNA, 1512 bp, Homo sapiens
  misc_feature 1..1512: note = signal regulatory protein alpha (SIRP-alpha)isoform 1
  source 1..1512: mol_type = genomic DNA
atggagcccgccggcccggcccccggccgcctcgggccgctgctctgcctgctgctcgccgcgtcctgcgcctggtcaggagtggcgggtgaggaggagctgcaggtgattcagcctgacaagtccgtgttggttgcagctggagagacagccactctgcgctgcactgcgacctctctgatccctgtggggcccatccagtggttcagaggagctggaccaggccgggaattaatctacaatcaaaaagaaggccacttcccccgggtaacaactgtttcagacctcacaaagagaaacaacatggacttttccatccgcatcggtaacatcaccccagcagatgccggcacctactactgtgtgaagttccggaaagggagccccgatgacgtggagtttaagtctggagcaggcactgagctgtctgtgcgcgccaaaccctctgcccccgtggtatcgggccctgcggcgagggccacacctcagcacacagtgagcttcacctgcgagtcccacggcttctcacccagagacatcaccctgaaatggttcaaaaatgggaatgagctctcagacttccagaccaacgtggaccccgtaggagagagcgtgtcctacagcatccacagcacagccaaggtggtgctgacccgcgaggacgttcactctcaagtcatctgcgaggtggcccacgtcaccttgcagggggaccctcttcgtgggactgccaacttgtctgagaccatccgagttccacccaccttggaggttactcaacagcccgtgagggcagagaaccaggtgaatgtcacctgccaggtgaggaagttctacccccagagactacagctgacctggttggagaatggaaacgtgtcccggacagaaacggcctcaaccgttacagagaacaaggatggtacctacaactggatgagctggctcctggtgaatgtatctgcccacagggatgatgtgaagctcacctgccaggtggagcatgacgggcagccagcggtcagcaaaagccatgacctgaaggtctcagcccacccgaaggagcagggctcaaataccgccgctgagaacactggatctaatgaacggaacatctatattgtggtgggtgtggtgtgcaccttgctggtggccctactgatggcggccctctacctcgtccgaatcagacagaagaaagcccagggctccacttcttctacaaggttgcatgagcccgagaagaatgccagagaaataacacaggacacaaatgatatcacatatgcagacctgaacctgcccaaggggaagaagcctgctccccaggctgcggagcccaacaaccacacggagtatgccagcattcagaccagcccgcagcccgcgtcggaggacaccctcacctatgctgacctggacatggtccacctcaaccggacccccaagcagccggcccccaagcctgagccgtccttctcagagtacgccagcgtccaggtcccgaggaag

SEQ ID NO: 34 - DNA, 1108 bp, Homo sapiens
  misc_feature 1..1108: note = TREX1 isoform 1
  source 1..1108: mol_type = genomic DNA
aatgggccctggagctcgcagacagggcaggattgtgcagggaaggcctgagatgtgcttctgcccaccccctaccccactccctccccttcggatcttaacactgggcactcacacacccaccccatgctcctctccaggctcagcagcaggtacgtacccaaccatgggctcgcaggccctgcccccggggcccatgcagaccctcatctttttcgacatggaggccactggcttgcccttctcccagcccaaggtcacggagctgtgcctgctggctgtccacagatgtgccctggagagcccccccacctctcaggggccacctcccacagttcctccaccaccgcgtgtggtagacaagctctccctgtgtgtggctccggggaaggcctgcagccctgcagccagcgagatcacaggtctgagcacagctgtgctggcagcgcatgggcgtcaatgttttgatgacaacctggccaacctgctcctagccttcctgcggcgccagccacagccctggtgcctggtggcacacaatggtgaccgctacgacttccccctgctccaagcagagctggctatgctgggcctcaccagtgctctggatggtgccttctgtgtggatagcatcactgcgctgaaggccctggagcgagcaagcagcccctcagaacacggcccaaggaagagctatagcctaggcagcatctacactcgcctgtatgggcagtcccctccagactcgcacacggctgagggtgatgtcctggccctgctcagcatctgtcagtggagaccacaggccctgctgcggtgggtggatgctcacgccaggcctttcggcaccatcaggcccatgtatggggtcacagcctctgctaggaccaagccaagaccatctgctgtcacaaccactgcacacctggccacaaccaggaacactagtcccagccttggagagagcaggggtaccaaggatcttcctccagtgaaggaccctggagccctatccagggaggggctgctggccccactgggtctgctggccatcctgaccttggcagtagccacactgtatggactatccctggccacacctggggag

SEQ ID NO: 35 - DNA, 933 bp, Homo sapiens
  misc_feature 1..933: note = V-domain Ig suppressor of T cell activation(VISTA)
  source 1..933: mol_type = genomic DNA
atgggcgtccccacggccctggaggccggcagctggcgctggggatccctgctcttcgctctcttcctggctgcgtccctaggtccggtggcagccttcaaggtcgccacgccgtattccctgtatgtctgtcccgaggggcagaacgtcaccctcacctgcaggctcttgggccctgtggacaaagggcacgatgtgaccttctacaagacgtggtaccgcagctcgaggggcgaggtgcagacctgctcagagcgccggcccatccgcaacctcacgttccaggaccttcacctgcaccatggaggccaccaggctgccaacaccagccacgacctggctcagcgccacgggctggagtcggcctccgaccaccatggcaacttctccatcaccatgcgcaacctgaccctgctggatagcggcctctactgctgcctggtggtggagatcaggcaccaccactcggagcacagggtccatggtgccatggagctgcaggtgcagacaggcaaagatgcaccatccaactgtgtggtgtacccatcctcctcccaggatagtgaaaacatcacggctgcagccctggctacgggtgcctgcatcgtaggaatcctctgcctccccctcatcctgctcctggtctacaagcaaaggcaggcagcctccaaccgccgtgcccaggagctggtgcggatggacagcaacattcaagggattgaaaaccccggctttgaagcctcaccacctgcccaggggatacccgaggccaaagtcaggcaccccctgtcctatgtggcccagcggcagccttctgagtctgggcggcatctgctttcggagcccagcacccccctgtctcctccaggccccggagacgtcttcttcccatccctggaccctgtccctgactctccaaactttgaggtcatc

SEQ ID NO: 36 - DNA, 45 bp, synthetic construct
  misc_feature 1..45: note = shRNA-encoding sequence for huPD-L1
  source 1..45: mol_type = other DNA
gtagagtatggtagcaatatctagagtattgctaccatactctac

SEQ ID NO: 37 - DNA, 45 bp, synthetic construct
  misc_feature 1..45: note = shRNA-encoding sequence for huCTNNB1
  source 1..45: mol_type = other DNA
gacagactgccttcaaatttctagagaatttgaaggcagtctgtc

SEQ ID NO: 38 - DNA, 45 bp, synthetic construct
  misc_feature 1..45: note = shRNA-encoding sequence for huSIRPalpha
  source 1..45: mol_type = other DNA
gccaggtgaggaagttctatctagagtagaacttcctcacctggc

SEQ ID NO: 39 - DNA, 45 bp, synthetic construct
  misc_feature 1..45: note = shRNA-encoding sequence for huTREX1
  source 1..45: mol_type = other DNA
gcagcgcatgggcgtcaattctagagattgacgcccatgcgctgc

SEQ ID NO: 40 - DNA, 45 bp, synthetic construct
  misc_feature 1..45: note = shRNA-encoding sequence for huVISTA
  source 1..45: mol_type = other DNA
gaccaccatggcaacttcttctagagagaagttgccatggtggtc

SEQ ID NO: 41 - DNA, 3220 bp, synthetic construct
  misc_feature 1..3220: note = pEQU6 vector
  source 1..3220: mol_type = other DNA
ctttcctgcgttatcccctgattctgtggataaccgtattaccgcctttgagtgagctgataccgctcgccgcagccgaacgaccgagcgcagcgagtcagtgagcgaggaagcggaagagcgcccaatacgcaaaccgcctctccccgcgcgttggccgattcattaatgcagctggcacgacaggtttcccgactggaaagcgggcagtgagcgcaacgcaattaatacgcgtaccgctagccaggaagagtttgtagaaacgcaaaaaggccatccgtcaggatggccttctgcttagtttgatgcctggcagtttatggcgggcgtcctgcccgccaccctccgggccgttgcttcacaacgttcaaatccgctcccggcggatttgtcctactcaggagagcgttcaccgacaaacaacagataaaacgaaaggcccagtcttccgactgagcctttcgttttatttgatgcctggcagttccctactctcgcgttaacgctagcatggatgttttcccagtcacgacgttgtaaaacgacggccagtcttaagctcgggccccaaataatgattttattttgactgatagtgacctgttcgttgcaacaaattgatgagcaatgcttttttataatgccaactttgtacaaaaaagcaggctttaaaggaaccaattcagtcgactggatccaaggtcgggcaggaagagggcctatttcccatgattccttcatatttgcatatacgatacaaggctgttagagagataattagaattaatttgactgtaaacacaaagatattagtacaaaatacgtgacgtagaaagtaataatttcttgggtagtttgcagttttaaaattatgttttaaaatggactatcatatgcttaccgtaacttgaaagtatttcgatttcttggctttatatatcttgtggaaaggacgaaactagttttttctcgagtagctagagaattcatggtaatagcgatgactaatacgtagatgtactgccaagtaggaaagtcccataaggtcatgtactgggcataatgccaggcgggccatttaccgtcattgacgtcaatagggggcgtacttggcatatgatacacttgatgtactgccaagtgggcagtttaccgtaaatagtccacccattgacgtcaatggaaagtccctattggcgttactatgggaacatacgtcattattgacgtcaatgggcgggggtcgttgggcggtcagccaggcgggccatttaccgtaagttatgtaacgcggaactccatatatgggctatgaactaatgaccccgtaattgattactattaataactagacccagctttcttgtacaaagttggcattataagaaagcattgcttatcaatttgttgcaacgaacaggtcactatcagtcaaaataaaatcattatttgccatccagctgatatcccctatagtgagtcgtattacatggtcatagctgtttcctggcagctctggcccgtgtctcaaaatctctgatgttacattgcacaagataaaaatatatcatcatgaacaataaaactgtctgcttacataaacagtaatacaaggggtgttatgagccatattcaacgggaaacgtcgaggccgcgattaaattccaacatggatgctgatttatatgggtataaatgggctcgcgataatgtcgggcaatcaggtgcgacaatctatcgcttgtatgggaagcccgatgcgccagagttgtttctgaaacatggcaaaggtagcgttgccaatgatgttacagatgagatggtcagactaaactggctgacggaatttatgcctcttccgaccatcaagcattttatccgtactcctgatgatgcatggttactcaccactgcgatccccggaaaaacagcattccaggtattagaagaatatcctgattcaggtgaaaatattgttgatgcgctggcagtgttcctgcgccggttgcattcgattcctgtttgtaattgtccttttaacagcgatcgcgtatttcgtctcgctcaggcgcaatcacgaatgaataacggtttggttgatgcgagtgattttgatgacgagcgtaatggctggcctgttgaacaagtctggaaagaaatgcataaacttttgccattctcaccggattcagtcgtcactcatggtgatttctcacttgataaccttatttttgacgaggggaaattaataggttgtattgatgttggacgagtcggaatcgcagaccgataccaggatcttgccatcctatggaactgcctcggtgagttttctccttcattacagaaacggctttttcaaaaatatggtattgataatcctgatatgaataaattgcagtttcatttgatgctcgatgagtttttctaatcagaattggttaattggttgtaacactggcagagcattacgctgacttgacgggacggcgcaagctcatgaccaaaatcccttaacgtgagttacgcgtcgttccactgagcgtcagaccccgtagaaaagatcaaaggatcttcttgagatcctttttttctgcgcgtaatctgctgcttgcaaacaaaaaaaccaccgctaccagcggtggtttgtttgccggatcaagagctaccaactctttttccgaaggtaactggcttcagcagagcgcagataccaaatactgtccttctagtgtagccgtagttaggccaccacttcaagaactctgtagcaccgcctacatacctcgctctgctaatcctgttaccagtggctgctgccagtggcgataagtcgtgtcttaccgggttggactcaagacgatagttaccggataaggcgcagcggtcgggctgaacggggggttcgtgcacacagcccagcttggagcgaacgacctacaccgaactgagatacctacagcgtgagcattgagaaagcgccacgcttcccgaagggagaaaggcggacaggtatccggtaagcggcagggtcggaacaggagagcgcacgagggagcttccagggggaaacgcctggtatctttatagtcctgtcgggtttcgccacctctgacttgagcgtcgatttttgtgatgctcgtcaggggggcggagcctatggaaaaacgccagcaacgcggcctttttacggttcctggccttttgctggccttttgct

SEQ ID NO: 42 - DNA, 3802 bp, synthetic construct
  misc_feature 1..3802: note = pEQU6-H1 Vector
  source 1..3802: mol_type = other DNA
ctttcctgcgttatcccctgattctgtggataaccgtattaccgcctttgagtgagctgataccgctcgccgcagccgaacgaccgagcgcagcgagtcagtgagcgaggaagcggaagagcgcccaatacgcaaaccgcctctccccgcgcgttggccgattcattaatgcagctggcacgacaggtttcccgactggaaagcgggcagtgagcgcaacgcaattaatacgcgtaccgctagccaggaagagtttgtagaaacgcaaaaaggccatccgtcaggatggccttctgcttagtttgatgcctggcagtttatggcgggcgtcctgcccgccaccctccgggccgttgcttcacaacgttcaaatccgctcccggcggatttgtcctactcaggagagcgttcaccgacaaacaacagataaaacgaaaggcccagtcttccgactgagcctttcgttttatttgatgcctggcagttccctactctcgcgttaacgctagcatggatgttttcccagtcacgacgttgtaaaacgacggccagtcttaagctcgggccccaaataatgattttattttgactgatagtgacctgttcgttgcaacaaattgatgagcaatgcttttttataatgccaactttgtacaaaaaagcaggctttaaaggaaccaattcagtcgagaattggtaccatatttgcatgtcgctatgtgttctgggaaatcaccataaacgtgaaatgtctttggatttgggaatcttataagttctgtatgagaccactccctaggtttttgtcgacagatctggcgcgccatagtggccagcggccgcaggtaagccagcccaggcctcgccctccagctcaaggcgggacaggtgccctagagtagcctgcatccagggacaggccccagccgggtgctgacacgtccacctccatctcttcctcaggtctgcccgggtggcatccctgtgacccctccccagtgcctctcctggccctggaagttgccactccagtgcccaccagccttgtcctaataaaattaagttgcatcattttgtctgactaggtgtccttctataatattatggggtggaggggggtggtatggagcaaggggcccaagttaacttgtttattgcagcttataatggttacaaataaagcaatagcatcacaaatttcacaaataaagcatttttttcactgcattctagttgtggtttgtccaaactcatcaatgtatcttatcatgtctggatccaaggtcgggcaggaagagggcctatttcccatgattccttcatatttgcatatacgatacaaggctgttagagagataattagaattaatttgactgtaaacacaaagatattagtacaaaatacgtgacgtagaaagtaataatttcttgggtagtttgcagttttaaaattatgttttaaaatggactatcatatgcttaccgtaacttgaaagtatttcgatttcttggctttatatatcttgtggaaaggacgaaactagttttttctcgagtagctagagaattcatggtaatagcgatgactaatacgtagatgtactgccaagtaggaaagtcccataaggtcatgtactgggcataatgccaggcgggccatttaccgtcattgacgtcaatagggggcgtacttggcatatgatacacttgatgtactgccaagtgggcagtttaccgtaaatagtccacccattgacgtcaatggaaagtccctattggcgttactatgggaacatacgtcattattgacgtcaatgggcgggggtcgttgggcggtcagccaggcgggccatttaccgtaagttatgtaacgcggaactccatatatgggctatgaactaatgaccccgtaattgattactattaataactagacccagctttcttgtacaaagttggcattataagaaagcattgcttatcaatttgttgcaacgaacaggtcactatcagtcaaaataaaatcattatttgccatccagctgatatcccctatagtgagtcgtattacatggtcatagctgtttcctggcagctctggcccgtgtctcaaaatctctgatgttacattgcacaagataaaaatatatcatcatgaacaataaaactgtctgcttacataaacagtaatacaaggggtgttatgagccatattcaacgggaaacgtcgaggccgcgattaaattccaacatggatgctgatttatatgggtataaatgggctcgcgataatgtcgggcaatcaggtgcgacaatctatcgcttgtatgggaagcccgatgcgccagagttgtttctgaaacatggcaaaggtagcgttgccaatgatgttacagatgagatggtcagactaaactggctgacggaatttatgcctcttccgaccatcaagcattttatccgtactcctgatgatgcatggttactcaccactgcgatccccggaaaaacagcattccaggtattagaagaatatcctgattcaggtgaaaatattgttgatgcgctggcagtgttcctgcgccggttgcattcgattcctgtttgtaattgtccttttaacagcgatcgcgtatttcgtctcgctcaggcgcaatcacgaatgaataacggtttggttgatgcgagtgattttgatgacgagcgtaatggctggcctgttgaacaagtctggaaagaaatgcataaacttttgccattctcaccggattcagtcgtcactcatggtgatttctcacttgataaccttatttttgacgaggggaaattaataggttgtattgatgttggacgagtcggaatcgcagaccgataccaggatcttgccatcctatggaactgcctcggtgagttttctccttcattacagaaacggctttttcaaaaatatggtattgataatcctgatatgaataaattgcagtttcatttgatgctcgatgagtttttctaatcagaattggttaattggttgtaacactggcagagcattacgctgacttgacgggacggcgcaagctcatgaccaaaatcccttaacgtgagttacgcgtcgttccactgagcgtcagaccccgtagaaaagatcaaaggatcttcttgagatcctttttttctgcgcgtaatctgctgcttgcaaacaaaaaaaccaccgctaccagcggtggtttgtttgccggatcaagagctaccaactctttttccgaaggtaactggcttcagcagagcgcagataccaaatactgtccttctagtgtagccgtagttaggccaccacttcaagaactctgtagcaccgcctacatacctcgctctgctaatcctgttaccagtggctgctgccagtggcgataagtcgtgtcttaccgggttggactcaagacgatagttaccggataaggcgcagcggtcgggctgaacggggggttcgtgcacacagcccagcttggagcgaacgacctacaccgaactgagatacctacagcgtgagcattgagaaagcgccacgcttcccgaagggagaaaggcggacaggtatccggtaagcggcagggtcggaacaggagagcgcacgagggagcttccagggggaaacgcctggtatctttatagtcctgtcgggtttcgccacctctgacttgagcgtcgatttttgtgatgctcgtcaggggggcggagcctatggaaaaacgccagcaacgcggcctttttacggttcctggccttttgctggccttttgct

SEQ ID NO: 43 - DNA, 3263 bp, synthetic construct
  misc_feature 1..3263: note = pEQU6-shPDL1-shRNA Vector
  source 1..3263: mol_type = other DNA
ctttcctgcgttatcccctgattctgtggataaccgtattaccgcctttgagtgagctgataccgctcgccgcagccgaacgaccgagcgcagcgagtcagtgagcgaggaagcggaagagcgcccaatacgcaaaccgcctctccccgcgcgttggccgattcattaatgcagctggcacgacaggtttcccgactggaaagcgggcagtgagcgcaacgcaattaatacgcgtaccgctagccaggaagagtttgtagaaacgcaaaaaggccatccgtcaggatggccttctgcttagtttgatgcctggcagtttatggcgggcgtcctgcccgccaccctccgggccgttgcttcacaacgttcaaatccgctcccggcggatttgtcctactcaggagagcgttcaccgacaaacaacagataaaacgaaaggcccagtcttccgactgagcctttcgttttatttgatgcctggcagttccctactctcgcgttaacgctagcatggatgttttcccagtcacgacgttgtaaaacgacggccagtcttaagctcgggccccaaataatgattttattttgactgatagtgacctgttcgttgcaacaaattgatgagcaatgcttttttataatgccaactttgtacaaaaaagcaggctttaaaggaaccaattcagtcgactggatccaaggtcgggcaggaagagggcctatttcccatgattccttcatatttgcatatacgatacaaggctgttagagagataattagaattaatttgactgtaaacacaaagatattagtacaaaatacgtgacgtagaaagtaataatttcttgggtagtttgcagttttaaaattatgttttaaaatggactatcatatgcttaccgtaacttgaaagtatttcgatttcttggctttatatatcttgtggaaaggacgaaactaggtagagtatggtagcaatatctagagtattgctaccatactctacttttttcgagtagctagagaattcatggtaatagcgatgactaatacgtagatgtactgccaagtaggaaagtcccataaggtcatgtactgggcataatgccaggcgggccatttaccgtcattgacgtcaatagggggcgtacttggcatatgatacacttgatgtactgccaagtgggcagtttaccgtaaatagtccacccattgacgtcaatggaaagtccctattggcgttactatgggaacatacgtcattattgacgtcaatgggcgggggtcgttgggcggtcagccaggcgggccatttaccgtaagttatgtaacgcggaactccatatatgggctatgaactaatgaccccgtaattgattactattaataactagacccagctttcttgtacaaagttggcattataagaaagcattgcttatcaatttgttgcaacgaacaggtcactatcagtcaaaataaaatcattatttgccatccagctgatatcccctatagtgagtcgtattacatggtcatagctgtttcctggcagctctggcccgtgtctcaaaatctctgatgttacattgcacaagataaaaatatatcatcatgaacaataaaactgtctgcttacataaacagtaatacaaggggtgttatgagccatattcaacgggaaacgtcgaggccgcgattaaattccaacatggatgctgatttatatgggtataaatgggctcgcgataatgtcgggcaatcaggtgcgacaatctatcgcttgtatgggaagcccgatgcgccagagttgtttctgaaacatggcaaaggtagcgttgccaatgatgttacagatgagatggtcagactaaactggctgacggaatttatgcctcttccgaccatcaagcattttatccgtactcctgatgatgcatggttactcaccactgcgatccccggaaaaacagcattccaggtattagaagaatatcctgattcaggtgaaaatattgttgatgcgctggcagtgttcctgcgccggttgcattcgattcctgtttgtaattgtccttttaacagcgatcgcgtatttcgtctcgctcaggcgcaatcacgaatgaataacggtttggttgatgcgagtgattttgatgacgagcgtaatggctggcctgttgaacaagtctggaaagaaatgcataaacttttgccattctcaccggattcagtcgtcactcatggtgatttctcacttgataaccttatttttgacgaggggaaattaataggttgtattgatgttggacgagtcggaatcgcagaccgataccaggatcttgccatcctatggaactgcctcggtgagttttctccttcattacagaaacggctttttcaaaaatatggtattgataatcctgatatgaataaattgcagtttcatttgatgctcgatgagtttttctaatcagaattggttaattggttgtaacactggcagagcattacgctgacttgacgggacggcgcaagctcatgaccaaaatcccttaacgtgagttacgcgtcgttccactgagcgtcagaccccgtagaaaagatcaaaggatcttcttgagatcctttttttctgcgcgtaatctgctgcttgcaaacaaaaaaaccaccgctaccagcggtggtttgtttgccggatcaagagctaccaactctttttccgaaggtaactggcttcagcagagcgcagataccaaatactgtccttctagtgtagccgtagttaggccaccacttcaagaactctgtagcaccgcctacatacctcgctctgctaatcctgttaccagtggctgctgccagtggcgataagtcgtgtcttaccgggttggactcaagacgatagttaccggataaggcgcagcggtcgggctgaacggggggttcgtgcacacagcccagcttggagcgaacgacctacaccgaactgagatacctacagcgtgagcattgagaaagcgccacgcttcccgaagggagaaaggcggacaggtatccggtaagcggcagggtcggaacaggagagcgcacgagggagcttccagggggaaacgcctggtatctttatagtcctgtcgggtttcgccacctctgacttgagcgtcgatttttgtgatgctcgtcaggggggcggagcctatggaaaaacgccagcaacgcggcctttttacggttcctggccttttgctggccttttgct

SEQ ID NO: 44 - DNA, 3888 bp, synthetic construct
  misc_feature 1..3888: note = pEQU6-shPDL1-H1-shCTNNB1 Vector
  source 1..3888: mol_type = other DNA
ctttcctgcgttatcccctgattctgtggataaccgtattaccgcctttgagtgagctgataccgctcgccgcagccgaacgaccgagcgcagcgagtcagtgagcgaggaagcggaagagcgcccaatacgcaaaccgcctctccccgcgcgttggccgattcattaatgcagctggcacgacaggtttcccgactggaaagcgggcagtgagcgcaacgcaattaatacgcgtaccgctagccaggaagagtttgtagaaacgcaaaaaggccatccgtcaggatggccttctgcttagtttgatgcctggcagtttatggcgggcgtcctgcccgccaccctccgggccgttgcttcacaacgttcaaatccgctcccggcggatttgtcctactcaggagagcgttcaccgacaaacaacagataaaacgaaaggcccagtcttccgactgagcctttcgttttatttgatgcctggcagttccctactctcgcgttaacgctagcatggatgttttcccagtcacgacgttgtaaaacgacggccagtcttaagctcgggccccaaataatgattttattttgactgatagtgacctgttcgttgcaacaaattgatgagcaatgcttttttataatgccaactttgtacaaaaaagcaggctttaaaggaaccaattcagtcgagaattggtaccatatttgcatgtcgctatgtgttctgggaaatcaccataaacgtgaaatgtctttggatttgggaatcttataagttctgtatgagaccactccctaggacagactgccttcaaatttctagagaatttgaaggcagtctgtcttttttcgacagatctggcgcgccatagtggccagcggccgcaggtaagccagcccaggcctcgccctccagctcaaggcgggacaggtgccctagagtagcctgcatccagggacaggccccagccgggtgctgacacgtccacctccatctcttcctcaggtctgcccgggtggcatccctgtgacccctccccagtgcctctcctggccctggaagttgccactccagtgcccaccagccttgtcctaataaaattaagttgcatcattttgtctgactaggtgtccttctataatattatggggtggaggggggtggtatggagcaaggggcccaagttaacttgtttattgcagcttataatggttacaaataaagcaatagcatcacaaatttcacaaataaagcatttttttcactgcattctagttgtggtttgtccaaactcatcaatgtatcttatcatgtctggatccaaggtcgggcaggaagagggcctatttcccatgattccttcatatttgcatatacgatacaaggctgttagagagataattagaattaatttgactgtaaacacaaagatattagtacaaaatacgtgacgtagaaagtaataatttcttgggtagtttgcagttttaaaattatgttttaaaatggactatcatatgcttaccgtaacttgaaagtatttcgatttcttggctttatatatcttgtggaaaggacgaaactaggtagagtatggtagcaatatctagagtattgctaccatactctacttttttcgagtagctagagaattcatggtaatagcgatgactaatacgtagatgtactgccaagtaggaaagtcccataaggtcatgtactgggcataatgccaggcgggccatttaccgtcattgacgtcaatagggggcgtacttggcatatgatacacttgatgtactgccaagtgggcagtttaccgtaaatagtccacccattgacgtcaatggaaagtccctattggcgttactatgggaacatacgtcattattgacgtcaatgggcgggggtcgttgggcggtcagccaggcgggccatttaccgtaagttatgtaacgcggaactccatatatgggctatgaactaatgaccccgtaattgattactattaataactagacccagctttcttgtacaaagttggcattataagaaagcattgcttatcaatttgttgcaacgaacaggtcactatcagtcaaaataaaatcattatttgccatccagctgatatcccctatagtgagtcgtattacatggtcatagctgtttcctggcagctctggcccgtgtctcaaaatctctgatgttacattgcacaagataaaaatatatcatcatgaacaataaaactgtctgcttacataaacagtaatacaaggggtgttatgagccatattcaacgggaaacgtcgaggccgcgattaaattccaacatggatgctgatttatatgggtataaatgggctcgcgataatgtcgggcaatcaggtgcgacaatctatcgcttgtatgggaagcccgatgcgccagagttgtttctgaaacatggcaaaggtagcgttgccaatgatgttacagatgagatggtcagactaaactggctgacggaatttatgcctcttccgaccatcaagcattttatccgtactcctgatgatgcatggttactcaccactgcgatccccggaaaaacagcattccaggtattagaagaatatcctgattcaggtgaaaatattgttgatgcgctggcagtgttcctgcgccggttgcattcgattcctgtttgtaattgtccttttaacagcgatcgcgtatttcgtctcgctcaggcgcaatcacgaatgaataacggtttggttgatgcgagtgattttgatgacgagcgtaatggctggcctgttgaacaagtctggaaagaaatgcataaacttttgccattctcaccggattcagtcgtcactcatggtgatttctcacttgataaccttatttttgacgaggggaaattaataggttgtattgatgttggacgagtcggaatcgcagaccgataccaggatcttgccatcctatggaactgcctcggtgagttttctccttcattacagaaacggctttttcaaaaatatggtattgataatcctgatatgaataaattgcagtttcatttgatgctcgatgagtttttctaatcagaattggttaattggttgtaacactggcagagcattacgctgacttgacgggacggcgcaagctcatgaccaaaatcccttaacgtgagttacgcgtcgttccactgagcgtcagaccccgtagaaaagatcaaaggatcttcttgagatcctttttttctgcgcgtaatctgctgcttgcaaacaaaaaaaccaccgctaccagcggtggtttgtttgccggatcaagagctaccaactctttttccgaaggtaactggcttcagcagagcgcagataccaaatactgtccttctagtgtagccgtagttaggccaccacttcaagaactctgtagcaccgcctacatacctcgctctgctaatcctgttaccagtggctgctgccagtggcgataagtcgtgtcttaccgggttggactcaagacgatagttaccggataaggcgcagcggtcgggctgaacggggggttcgtgcacacagcccagcttggagcgaacgacctacaccgaactgagatacctacagcgtgagcattgagaaagcgccacgcttcccgaagggagaaaggcggacaggtatccggtaagcggcagggtcggaacaggagagcgcacgagggagcttccagggggaaacgcctggtatctttatagtcctgtcgggtttcgccacctctgacttgagcgtcgatttttgtgatgctcgtcaggggggcggagcctatggaaaaacgccagcaacgcggcctttttacggttcctggccttttgctggccttttgct

SEQ ID NO: 45 - DNA, 3888 bp, synthetic construct
  misc_feature 1..3888: note = pEQU6-shPDL1-H1-shSIRPalpha Vector
  source 1..3888: mol_type = other DNA
ctttcctgcgttatcccctgattctgtggataaccgtattaccgcctttgagtgagctgataccgctcgccgcagccgaacgaccgagcgcagcgagtcagtgagcgaggaagcggaagagcgcccaatacgcaaaccgcctctccccgcgcgttggccgattcattaatgcagctggcacgacaggtttcccgactggaaagcgggcagtgagcgcaacgcaattaatacgcgtaccgctagccaggaagagtttgtagaaacgcaaaaaggccatccgtcaggatggccttctgcttagtttgatgcctggcagtttatggcgggcgtcctgcccgccaccctccgggccgttgcttcacaacgttcaaatccgctcccggcggatttgtcctactcaggagagcgttcaccgacaaacaacagataaaacgaaaggcccagtcttccgactgagcctttcgttttatttgatgcctggcagttccctactctcgcgttaacgctagcatggatgttttcccagtcacgacgttgtaaaacgacggccagtcttaagctcgggccccaaataatgattttattttgactgatagtgacctgttcgttgcaacaaattgatgagcaatgcttttttataatgccaactttgtacaaaaaagcaggctttaaaggaaccaattcagtcgagaattggtaccatatttgcatgtcgctatgtgttctgggaaatcaccataaacgtgaaatgtctttggatttgggaatcttataagttctgtatgagaccactccctaggccaggtgaggaagttctatctagagtagaacttcctcacctggcttttttcgacagatctggcgcgccatagtggccagcggccgcaggtaagccagcccaggcctcgccctccagctcaaggcgggacaggtgccctagagtagcctgcatccagggacaggccccagccgggtgctgacacgtccacctccatctcttcctcaggtctgcccgggtggcatccctgtgacccctccccagtgcctctcctggccctggaagttgccactccagtgcccaccagccttgtcctaataaaattaagttgcatcattttgtctgactaggtgtccttctataatattatggggtggaggggggtggtatggagcaaggggcccaagttaacttgtttattgcagcttataatggttacaaataaagcaatagcatcacaaatttcacaaataaagcatttttttcactgcattctagttgtggtttgtccaaactcatcaatgtatcttatcatgtctggatccaaggtcgggcaggaagagggcctatttcccatgattccttcatatttgcatatacgatacaaggctgttagagagataattagaattaatttgactgtaaacacaaagatattagtacaaaatacgtgacgtagaaagtaataatttcttgggtagtttgcagttttaaaattatgttttaaaatggactatcatatgcttaccgtaacttgaaagtatttcgatttcttggctttatatatcttgtggaaaggacgaaactaggtagagtatggtagcaatatctagagtattgctaccatactctacttttttcgagtagctagagaattcatggtaatagcgatgactaatacgtagatgtactgccaagtaggaaagtcccataaggtcatgtactgggcataatgccaggcgggccatttaccgtcattgacgtcaatagggggcgtacttggcatatgatacacttgatgtactgccaagtgggcagtttaccgtaaatagtccacccattgacgtcaatggaaagtccctattggcgttactatgggaacatacgtcattattgacgtcaatgggcgggggtcgttgggcggtcagccaggcgggccatttaccgtaagttatgtaacgcggaactccatatatgggctatgaactaatgaccccgtaattgattactattaataactagacccagctttcttgtacaaagttggcattataagaaagcattgcttatcaatttgttgcaacgaacaggtcactatcagtcaaaataaaatcattatttgccatccagctgatatcccctatagtgagtcgtattacatggtcatagctgtttcctggcagctctggcccgtgtctcaaaatctctgatgttacattgcacaagataaaaatatatcatcatgaacaataaaactgtctgcttacataaacagtaatacaaggggtgttatgagccatattcaacgggaaacgtcgaggccgcgattaaattccaacatggatgctgatttatatgggtataaatgggctcgcgataatgtcgggcaatcaggtgcgacaatctatcgcttgtatgggaagcccgatgcgccagagttgtttctgaaacatggcaaaggtagcgttgccaatgatgttacagatgagatggtcagactaaactggctgacggaatttatgcctcttccgaccatcaagcattttatccgtactcctgatgatgcatggttactcaccactgcgatccccggaaaaacagcattccaggtattagaagaatatcctgattcaggtgaaaatattgttgatgcgctggcagtgttcctgcgccggttgcattcgattcctgtttgtaattgtccttttaacagcgatcgcgtatttcgtctcgctcaggcgcaatcacgaatgaataacggtttggttgatgcgagtgattttgatgacgagcgtaatggctggcctgttgaacaagtctggaaagaaatgcataaacttttgccattctcaccggattcagtcgtcactcatggtgatttctcacttgataaccttatttttgacgaggggaaattaataggttgtattgatgttggacgagtcggaatcgcagaccgataccaggatcttgccatcctatggaactgcctcggtgagttttctccttcattacagaaacggctttttcaaaaatatggtattgataatcctgatatgaataaattgcagtttcatttgatgctcgatgagtttttctaatcagaattggttaattggttgtaacactggcagagcattacgctgacttgacgggacggcgcaagctcatgaccaaaatcccttaacgtgagttacgcgtcgttccactgagcgtcagaccccgtagaaaagatcaaaggatcttcttgagatcctttttttctgcgcgtaatctgctgcttgcaaacaaaaaaaccaccgctaccagcggtggtttgtttgccggatcaagagctaccaactctttttccgaaggtaactggcttcagcagagcgcagataccaaatactgtccttctagtgtagccgtagttaggccaccacttcaagaactctgtagcaccgcctacatacctcgctctgctaatcctgttaccagtggctgctgccagtggcgataagtcgtgtcttaccgggttggactcaagacgatagttaccggataaggcgcagcggtcgggctgaacggggggttcgtgcacacagcccagcttggagcgaacgacctacaccgaactgagatacctacagcgtgagcattgagaaagcgccacgcttcccgaagggagaaaggcggacaggtatccggtaagcggcagggtcggaacaggagagcgcacgagggagcttccagggggaaacgcctggtatctttatagtcctgtcgggtttcgccacctctgacttgagcgtcgatttttgtgatgctcgtcaggggggcggagcctatggaaaaacgccagcaacgcggcctttttacggttcctggccttttgctggccttttgct

SEQ ID NO: 46 - DNA, 3888 bp, synthetic construct
  misc_feature 1..3888: note = pEQU6-shPDL1-H1-shTREX1
  source 1..3888: mol_type = other DNA
ctttcctgcgttatcccctgattctgtggataaccgtattaccgcctttgagtgagctgataccgctcgccgcagccgaacgaccgagcgcagcgagtcagtgagcgaggaagcggaagagcgcccaatacgcaaaccgcctctccccgcgcgttggccgattcattaatgcagctggcacgacaggtttcccgactggaaagcgggcagtgagcgcaacgcaattaatacgcgtaccgctagccaggaagagtttgtagaaacgcaaaaaggccatccgtcaggatggccttctgcttagtttgatgcctggcagtttatggcgggcgtcctgcccgccaccctccgggccgttgcttcacaacgttcaaatccgctcccggcggatttgtcctactcaggagagcgttcaccgacaaacaacagataaaacgaaaggcccagtcttccgactgagcctttcgttttatttgatgcctggcagttccctactctcgcgttaacgctagcatggatgttttcccagtcacgacgttgtaaaacgacggccagtcttaagctcgggccccaaataatgattttattttgactgatagtgacctgttcgttgcaacaaattgatgagcaatgcttttttataatgccaactttgtacaaaaaagcaggctttaaaggaaccaattcagtcgagaattggtaccatatttgcatgtcgctatgtgttctgggaaatcaccataaacgtgaaatgtctttggatttgggaatcttataagttctgtatgagaccactccctaggcagcgcatgggcgtcaattctagagattgacgcccatgcgctgcttttttcgacagatctggcgcgccatagtggccagcggccgcaggtaagccagcccaggcctcgccctccagctcaaggcgggacaggtgccctagagtagcctgcatccagggacaggccccagccgggtgctgacacgtccacctccatctcttcctcaggtctgcccgggtggcatccctgtgacccctccccagtgcctctcctggccctggaagttgccactccagtgcccaccagccttgtcctaataaaattaagttgcatcattttgtctgactaggtgtccttctataatattatggggtggaggggggtggtatggagcaaggggcccaagttaacttgtttattgcagcttataatggttacaaataaagcaatagcatcacaaatttcacaaataaagcatttttttcactgcattctagttgtggtttgtccaaactcatcaatgtatcttatcatgtctggatccaaggtcgggcaggaagagggcctatttcccatgattccttcatatttgcatatacgatacaaggctgttagagagataattagaattaatttgactgtaaacacaaagatattagtacaaaatacgtgacgtagaaagtaataatttcttgggtagtttgcagttttaaaattatgttttaaaatggactatcatatgcttaccgtaacttgaaagtatttcgatttcttggctttatatatcttgtggaaaggacgaaactaggtagagtatggtagcaatatctagagtattgctaccatactctacttttttcgagtagctagagaattcatggtaatagcgatgactaatacgtagatgtactgccaagtaggaaagtcccataaggtcatgtactgggcataatgccaggcgggccatttaccgtcattgacgtcaatagggggcgtacttggcatatgatacacttgatgtactgccaagtgggcagtttaccgtaaatagtccacccattgacgtcaatggaaagtccctattggcgttactatgggaacatacgtcattattgacgtcaatgggcgggggtcgttgggcggtcagccaggcgggccatttaccgtaagttatgtaacgcggaactccatatatgggctatgaactaatgaccccgtaattgattactattaataactagacccagctttcttgtacaaagttggcattataagaaagcattgcttatcaatttgttgcaacgaacaggtcactatcagtcaaaataaaatcattatttgccatccagctgatatcccctatagtgagtcgtattacatggtcatagctgtttcctggcagctctggcccgtgtctcaaaatctctgatgttacattgcacaagataaaaatatatcatcatgaacaataaaactgtctgcttacataaacagtaatacaaggggtgttatgagccatattcaacgggaaacgtcgaggccgcgattaaattccaacatggatgctgatttatatgggtataaatgggctcgcgataatgtcgggcaatcaggtgcgacaatctatcgcttgtatgggaagcccgatgcgccagagttgtttctgaaacatggcaaaggtagcgttgccaatgatgttacagatgagatggtcagactaaactggctgacggaatttatgcctcttccgaccatcaagcattttatccgtactcctgatgatgcatggttactcaccactgcgatccccggaaaaacagcattccaggtattagaagaatatcctgattcaggtgaaaatattgttgatgcgctggcagtgttcctgcgccggttgcattcgattcctgtttgtaattgtccttttaacagcgatcgcgtatttcgtctcgctcaggcgcaatcacgaatgaataacggtttggttgatgcgagtgattttgatgacgagcgtaatggctggcctgttgaacaagtctggaaagaaatgcataaacttttgccattctcaccggattcagtcgtcactcatggtgatttctcacttgataaccttatttttgacgaggggaaattaataggttgtattgatgttggacgagtcggaatcgcagaccgataccaggatcttgccatcctatggaactgcctcggtgagttttctccttcattacagaaacggctttttcaaaaatatggtattgataatcctgatatgaataaattgcagtttcatttgatgctcgatgagtttttctaatcagaattggttaattggttgtaacactggcagagcattacgctgacttgacgggacggcgcaagctcatgaccaaaatcccttaacgtgagttacgcgtcgttccactgagcgtcagaccccgtagaaaagatcaaaggatcttcttgagatcctttttttctgcgcgtaatctgctgcttgcaaacaaaaaaaccaccgctaccagcggtggtttgtttgccggatcaagagctaccaactctttttccgaaggtaactggcttcagcagagcgcagataccaaatactgtccttctagtgtagccgtagttaggccaccacttcaagaactctgtagcaccgcctacatacctcgctctgctaatcctgttaccagtggctgctgccagtggcgataagtcgtgtcttaccgggttggactcaagacgatagttaccggataaggcgcagcggtcgggctgaacggggggttcgtgcacacagcccagcttggagcgaacgacctacaccgaactgagatacctacagcgtgagcattgagaaagcgccacgcttcccgaagggagaaaggcggacaggtatccggtaagcggcagggtcggaacaggagagcgcacgagggagcttccagggggaaacgcctggtatctttatagtcctgtcgggtttcgccacctctgacttgagcgtcgatttttgtgatgctcgtcaggggggcggagcctatggaaaaacgccagcaacgcggcctttttacggttcctggccttttgctggccttttgct

SEQ ID NO: 47 - DNA, 3888 bp, synthetic construct
  misc_feature 1..3888: note = pEQU6-shPDL1-H1-shVISTA
  source 1..3888: mol_type = other DNA
ctttcctgcgttatcccctgattctgtggataaccgtattaccgcctttgagtgagctgataccgctcgccgcagccgaacgaccgagcgcagcgagtcagtgagcgaggaagcggaagagcgcccaatacgcaaaccgcctctccccgcgcgttggccgattcattaatgcagctggcacgacaggtttcccgactggaaagcgggcagtgagcgcaacgcaattaatacgcgtaccgctagccaggaagagtttgtagaaacgcaaaaaggccatccgtcaggatggccttctgcttagtttgatgcctggcagtttatggcgggcgtcctgcccgccaccctccgggccgttgcttcacaacgttcaaatccgctcccggcggatttgtcctactcaggagagcgttcaccgacaaacaacagataaaacgaaaggcccagtcttccgactgagcctttcgttttatttgatgcctggcagttccctactctcgcgttaacgctagcatggatgttttcccagtcacgacgttgtaaaacgacggccagtcttaagctcgggccccaaataatgattttattttgactgatagtgacctgttcgttgcaacaaattgatgagcaatgcttttttataatgccaactttgtacaaaaaagcaggctttaaaggaaccaattcagtcgagaattggtaccatatttgcatgtcgctatgtgttctgggaaatcaccataaacgtgaaatgtctttggatttgggaatcttataagttctgtatgagaccactccctaggaccaccatggcaacttcttctagagagaagttgccatggtggtcttttttcgacagatctggcgcgccatagtggccagcggccgcaggtaagccagcccaggcctcgccctccagctcaaggcgggacaggtgccctagagtagcctgcatccagggacaggccccagccgggtgctgacacgtccacctccatctcttcctcaggtctgcccgggtggcatccctgtgacccctccccagtgcctctcctggccctggaagttgccactccagtgcccaccagccttgtcctaataaaattaagttgcatcattttgtctgactaggtgtccttctataatattatggggtggaggggggtggtatggagcaaggggcccaagttaacttgtttattgcagcttataatggttacaaataaagcaatagcatcacaaatttcacaaataaagcatttttttcactgcattctagttgtggtttgtccaaactcatcaatgtatcttatcatgtctggatccaaggtcgggcaggaagagggcctatttcccatgattccttcatatttgcatatacgatacaaggctgttagagagataattagaattaatttgactgtaaacacaaagatattagtacaaaatacgtgacgtagaaagtaataatttcttgggtagtttgcagttttaaaattatgttttaaaatggactatcatatgcttaccgtaacttgaaagtatttcgatttcttggctttatatatcttgtggaaaggacgaaactaggtagagtatggtagcaatatctagagtattgctaccatactctacttttttcgagtagctagagaattcatggtaatagcgatgactaatacgtagatgtactgccaagtaggaaagtcccataaggtcatgtactgggcataatgccaggcgggccatttaccgtcattgacgtcaatagggggcgtacttggcatatgatacacttgatgtactgccaagtgggcagtttaccgtaaatagtccacccattgacgtcaatggaaagtccctattggcgttactatgggaacatacgtcattattgacgtcaatgggcgggggtcgttgggcggtcagccaggcgggccatttaccgtaagttatgtaacgcggaactccatatatgggctatgaactaatgaccccgtaattgattactattaataactagacccagctttcttgtacaaagttggcattataagaaagcattgcttatcaatttgttgcaacgaacaggtcactatcagtcaaaataaaatcattatttgccatccagctgatatcccctatagtgagtcgtattacatggtcatagctgtttcctggcagctctggcccgtgtctcaaaatctctgatgttacattgcacaagataaaaatatatcatcatgaacaataaaactgtctgcttacataaacagtaatacaaggggtgttatgagccatattcaacgggaaacgtcgaggccgcgattaaattccaacatggatgctgatttatatgggtataaatgggctcgcgataatgtcgggcaatcaggtgcgacaatctatcgcttgtatgggaagcccgatgcgccagagttgtttctgaaacatggcaaaggtagcgttgccaatgatgttacagatgagatggtcagactaaactggctgacggaatttatgcctcttccgaccatcaagcattttatccgtactcctgatgatgcatggttactcaccactgcgatccccggaaaaacagcattccaggtattagaagaatatcctgattcaggtgaaaatattgttgatgcgctggcagtgttcctgcgccggttgcattcgattcctgtttgtaattgtccttttaacagcgatcgcgtatttcgtctcgctcaggcgcaatcacgaatgaataacggtttggttgatgcgagtgattttgatgacgagcgtaatggctggcctgttgaacaagtctggaaagaaatgcataaacttttgccattctcaccggattcagtcgtcactcatggtgatttctcacttgataaccttatttttgacgaggggaaattaataggttgtattgatgttggacgagtcggaatcgcagaccgataccaggatcttgccatcctatggaactgcctcggtgagttttctccttcattacagaaacggctttttcaaaaatatggtattgataatcctgatatgaataaattgcagtttcatttgatgctcgatgagtttttctaatcagaattggttaattggttgtaacactggcagagcattacgctgacttgacgggacggcgcaagctcatgaccaaaatcccttaacgtgagttacgcgtcgttccactgagcgtcagaccccgtagaaaagatcaaaggatcttcttgagatcctttttttctgcgcgtaatctgctgcttgcaaacaaaaaaaccaccgctaccagcggtggtttgtttgccggatcaagagctaccaactctttttccgaaggtaactggcttcagcagagcgcagataccaaatactgtccttctagtgtagccgtagttaggccaccacttcaagaactctgtagcaccgcctacatacctcgctctgctaatcctgttaccagtggctgctgccagtggcgataagtcgtgtcttaccgggttggactcaagacgatagttaccggataaggcgcagcggtcgggctgaacggggggttcgtgcacacagcccagcttggagcgaacgacctacaccgaactgagatacctacagcgtgagcattgagaaagcgccacgcttcccgaagggagaaaggcggacaggtatccggtaagcggcagggtcggaacaggagagcgcacgagggagcttccagggggaaacgcctggtatctttatagtcctgtcgggtttcgccacctctgacttgagcgtcgatttttgtgatgctcgtcaggggggcggagcctatggaaaaacgccagcaacgcggcctttttacggttcctggccttttgctggccttttgct

SEQ ID NO: 48 - DNA, 1104 bp, Salmonella typhimurium
  misc_feature 1..1104: note = Strain LT2 Aspartate-semialdehyde dehydrogenase(asd)
  source 1..1104: mol_type = genomic DNA
atgaaaaatgttggttttatcggctggcgcggaatggtcggctctgttctcatgcaacgcatggtagaggagcgcgatttcgacgctattcgccctgttttcttttctacctcccagtttggacaggcggcgcccaccttcggcgacacctccaccggcacgctacaggacgcttttgatctggatgcgctaaaagcgctcgatatcatcgtgacctgccagggcggcgattataccaacgaaatttatccaaagctgcgcgaaagcggatggcagggttactggattgatgcggcttctacgctgcgcatgaaagatgatgccattattattctcgacccggtcaaccaggacgtgattaccgacggcctgaacaatggcgtgaagacctttgtgggcggtaactgtaccgttagcctgatgttgatgtcgctgggcggtctctttgcccataatctcgttgactgggtatccgtcgcgacctatcaggccgcctccggcggcggcgcgcgccatatgcgcgagctgttaacccagatgggtcagttgtatggccatgtcgccgatgaactggcgacgccgtcttccgcaattcttgatattgaacgcaaagttacggcattgacccgcagcggcgagctgccggttgataactttggcgtaccgctggcgggaagcctgatcccctggatcgacaaacagctcgataacggccagagccgcgaagagtggaaaggccaggcggaaaccaacaagattctcaatactgcctctgtgattccggttgatggtttgtgtgtgcgcgtcggcgcgctgcgctgtcacagccaggcgttcaccatcaagctgaaaaaagaggtatccattccgacggtggaagaactgctggcggcacataatccgtgggcgaaagtggtgccgaacgatcgtgatatcactatgcgcgaattaaccccggcggcggtgaccggcacgttgactacgccggttggtcgtctgcgtaagctgaacatggggccagagttcttgtcggcgtttaccgtaggcgaccagttgttatggggcgccgccgagccgctgcgtcgaatgctgcgccagttggcg

SEQ ID NO: 49 - DNA, 861 bp, Salmonella typhimurium
  misc_feature 1..861: note = Strain LT2 TSX
  source 1..861: mol_type = genomic DNA
atgaaaaaaactttactcgcagtcagcgcagcgctggcgctcacctcatcttttactgctaacgcagcagaaaatgatcagccgcagtatttgtccgactggtggcaccagagcgtaaacgtggtaggcagctaccatacccgtttctcgccgaaattgaacaacgacgtctatctggaatatgaagcatttgccaaaaaagactggtttgatttctacggctatatcgatattcccaaaacctttgattggggtaacggcaacgataaaggtatctggtccgacggttctccgctgttcatggaaatcgaaccgcgtttctcaattgataagctgaccggcgcagacctgagcttcggcccgtttaaagagtggtatttcgccaacaactacatctacgatatgggcgataacaaagccagccgccagagcacgtggtatatgggtctggggaccgatatcgacaccggcctgccgatgggtctgtcgctgaacgtgtatgcgaaatatcagtggcaaaactacggcgcgtccaatgaaaacgaatgggacggctaccgtttcaaagtgaaatacttcgtccccatcaccgatctgtggggcggtaaactgagctatatcggctttaccaactttgactggggatctgatttaggcgacgatccgaaccgtaccagcaactccatcgcttccagccatatcctggcgctgaactacgatcactggcactactcggtcgttgcgcgttacttccataacggcggacagtggcagaatggcgcaaaactgaactggggcgacggcgatttcagcgcgaaatctaccggctggggcggctacctggtcgtgggttacaacttc

SEQ ID NO: 50 - DNA, 864 bp, Homo sapiens
  misc_feature 1..864: note = programmed cell death protein 1 (PD-1)
  source 1..864: mol_type = genomic DNA
atgcagatcccacaggcgccctggccagtcgtctgggcggtgctacaactgggctggcggccaggatggttcttagactccccagacaggccctggaacccccccaccttctccccagccctgctcgtggtgaccgaaggggacaacgccaccttcacctgcagcttctccaacacatcggagagcttcgtgctaaactggtaccgcatgagccccagcaaccagacggacaagctggccgccttccccgaggaccgcagccagcccggccaggactgccgcttccgtgtcacacaactgcccaacgggcgtgacttccacatgagcgtggtcagggcccggcgcaatgacagcggcacctacctctgtggggccatctccctggcccccaaggcgcagatcaaagagagcctgcgggcagagctcagggtgacagagagaagggcagaagtgcccacagcccaccccagcccctcacccaggccagccggccagttccaaaccctggtggttggtgtcgtgggcggcctgctgggcagcctggtgctgctagtctgggtcctggccgtcatctgctcccgggccgcacgagggacaataggagccaggcgcaccggccagcccctgaaggaggacccctcagccgtgcctgtgttctctgtggactatggggagctggatttccagtggcgagagaagaccccggagccccccgtgccctgtgtccctgagcagacggagtatgccaccattgtctttcctagcggaatgggcacctcatcccccgcccgcaggggctcagctgacggccctcggagtgcccagccactgaggcctgaggatggacactgctcttggcccctc

SEQ ID NO: 51 - DNA, 933 bp, Homo sapiens
  misc_feature 1..933: note = programmed cell death protein 2 (PD-2), isoform 1
  source 1..933: mol_type = genomic DNA
atggctgccgccggggccaggcctgtggagctgggcttcgccgagtcggcgccggcgtggcgactgcgcagcgagcagttccccagcaaggtgtatgcgccgctgcctggccgcccggacgccttccaccgctgcatcttcctcttctgctgccgcgagcagccgtgctgtgccggcctgcgagtttttaggaatcaactacccaggaaaaacgatttttactcatatgagccaccttctgagaatcctcccccagaaacaggagaatcagtgtgtctccagcttaagtctggtgctcatctctgcagggtttgtggctgtttaggccccaaaacgtgctccagatgccacaaagcatattactgcagcaaggagcatcagaccctagactggagattgggacataagcaggcttgtgcacaaccagatcatctggaccatataattccagaccacaacttcctttttccagaatttgaaattgtaatagaaacagaagatgagattatgcctgaggttgtggaaaaggaagattactcagagattatagggagcatgggtgaagcacttgaggaagaactggattccatggcaaaacatgaatccagggaagataaaatttttcagaagtttaaaactcagatagcccttgaaccagaacagattcttagatatggcagaggtattgcccccatctggatttctggtgaaaatattcctcaagaaaaggatattccagattgcccctgtggtgccaagagaatattggaattccaggtcatgcctcagctcctaaactacctgaaggctgacagactgggcaagagcattgactggggcatcctggctgtcttcacctgtgctgagagctgcagcttgggtactggctatacagaagaatttgtgtggaagcaggatgtaacagatacaccg

SEQ ID NO: 52 - DNA, 819 bp, Homo sapiens
  misc_feature 1..819: note = programmed death-ligand 2 (PD-L2), isoform 1
  source 1..819: mol_type = genomic DNA
atgatcttcctcctgctaatgttgagcctggaattgcagcttcaccagatagcagctttattcacagtgacagtccctaaggaactgtacataatagagcatggcagcaatgtgaccctggaatgcaactttgacactggaagtcatgtgaaccttggagcaataacagccagtttgcaaaaggtggaaaatgatacatccccacaccgtgaaagagccactttgctggaggagcagctgcccctagggaaggcctcgttccacatacctcaagtccaagtgagggacgaaggacagtaccaatgcataatcatctatggggtcgcctgggactacaagtacctgactctgaaagtcaaagcttcctacaggaaaataaacactcacatcctaaaggttccagaaacagatgaggtagagctcacctgccaggctacaggttatcctctggcagaagtatcctggccaaacgtcagcgttcctgccaacaccagccactccaggacccctgaaggcctctaccaggtcaccagtgttctgcgcctaaagccaccccctggcagaaacttcagctgtgtgttctggaatactcacgtgagggaacttactttggccagcattgaccttcaaagtcagatggaacccaggacccatccaacttggctgcttcacattttcatcccctcctgcatcattgctttcattttcatagccacagtgatagccctaagaaaacaactctgtcaaaagctgtattcttcaaaagacacaacaaaaagacctgtcaccacaacaaagagggaagtgaacagtgctatc

SEQ ID NO: 53 - DNA, 669 bp, Homo sapiens
  misc_feature 1..669: note = cytotoxic T-lymphocyte-associated protein 4(CTLA-4), isoform 1
  source 1..669: mol_type = genomic DNA
atggcttgccttggatttcagcggcacaaggctcagctgaacctggctaccaggacctggccctgcactctcctgttttttcttctcttcatccctgtcttctgcaaagcaatgcacgtggcccagcctgctgtggtactggccagcagccgaggcatcgccagctttgtgtgtgagtatgcatctccaggcaaagccactgaggtccgggtgacagtgcttcggcaggctgacagccaggtgactgaagtctgtgcggcaacctacatgatggggaatgagttgaccttcctagatgattccatctgcacgggcacctccagtggaaatcaagtgaacctcactatccaaggactgagggccatggacacgggactctacatctgcaaggtggagctcatgtacccaccgccatactacctgggcataggcaacggaacccagatttatgtaattgatccagaaccgtgcccagattctgacttcctcctctggatccttgcagcagttagttcggggttgtttttttatagctttctcctcacagctgtttctttgagcaaaatgctaaagaaaagaagccctcttacaacaggggtctatgtgaaaatgcccccaacagagccagaatgtgaaaagcaatttcagccttattttattcccatcaat

SEQ ID NO: 54 - DNA, 969 bp, Homo sapiens
  misc_feature 1..969: note = CD47 transcript variant 1
  source 1..969: mol_type = genomic DNA
atgtggcccctggtagcggcgctgttgctgggctcggcgtgctgcggatcagctcagctactatttaataaaacaaaatctgtagaattcacgttttgtaatgacactgtcgtcattccatgctttgttactaatatggaggcacaaaacactactgaagtatacgtaaagtggaaatttaaaggaagagatatttacacctttgatggagctctaaacaagtccactgtccccactgactttagtagtgcaaaaattgaagtctcacaattactaaaaggagatgcctctttgaagatggataagagtgatgctgtctcacacacaggaaactacacttgtgaagtaacagaattaaccagagaaggtgaaacgatcatcgagctaaaatatcgtgttgtttcatggttttctccaaatgaaaatattcttattgttattttcccaatttttgctatactcctgttctggggacagtttggtattaaaacacttaaatatagatccggtggtatggatgagaaaacaattgctttacttgttgctggactagtgatcactgtcattgtcattgttggagccattcttttcgtcccaggtgaatattcattaaagaatgctactggccttggtttaattgtgacttctacagggatattaatattacttcactactatgtgtttagtacagcgattggattaacctccttcgtcattgccatattggttattcaggtgatagcctatatcctcgctgtggttggactgagtctctgtattgcggcgtgtataccaatgcatggccctcttctgatttcaggtttgagtatcttagctctagcacaattacttggactagtttatatgaaatttgtggcttccaatcagaagactatacaacctcctaggaaagctgtagaggaaccccttaatgcattcaaagaatcaaaaggaatgatgaatgatgaa

SEQ ID NO: 55 - DNA, 1209 bp, Homo sapiens
  misc_feature 1..1209: note = indoleamine 2,3-dioxygenase (IDO) 1
  source 1..1209: mol_type = genomic DNA
atggcacacgctatggaaaactcctggacaatcagtaaagagtaccatattgatgaagaagtgggctttgctctgccaaatccacaggaaaatctacctgatttttataatgactggatgttcattgctaaacatctgcctgatctcatagagtctggccagcttcgagaaagagttgagaagttaaacatgctcagcattgatcatctcacagaccacaagtcacagcgccttgcacgtctagttctgggatgcatcaccatggcatatgtgtggggcaaaggtcatggagatgtccgtaaggtcttgccaagaaatattgctgttccttactgccaactctccaagaaactggaactgcctcctattttggtttatgcagactgtgtcttggcaaactggaagaaaaaggatcctaataagcccctgacttatgagaacatggacgttttgttctcatttcgtgatggagactgcagtaaaggattcttcctggtctctctattggtggaaatagcagctgcttctgcaatcaaagtaattcctactgtattcaaggcaatgcaaatgcaagaacgggacactttgctaaaggcgctgttggaaatagcttcttgcttggagaaagcccttcaagtgtttcaccaaatccacgatcatgtgaacccaaaagcatttttcagtgttcttcgcatatatttgtctggctggaaaggcaacccccagctatcagacggtctggtgtatgaaaggttctgggaagacccaaaggagtttgcagggggcagtgcaggccaaagcagcgtctttcagtgctttgacgtcctgctgggcatccagcagactgctggtggaggacatgctgctcagttcctccaggacatgagaagatatatgccaccagctcacaggaacttcctgtgctcattagagtcaaatccctcagtccgtgagtttgtcctttcaaaaggtgatgctggcctgcgggaagcttatgacgcctgtgtgaaagctctggtctccctgaggagctaccatctgcaaatcgtgactaagtacatcctgattcctgcaagccagcagccaaaggagaataagacctctgaagacccttcaaaactggaagccaaaggaactggaggcactgatttaatgaatttcctgaagactgtaagaagtacaactgagaaatcccttttgaaggaaggt

SEQ ID NO: 56 - DNA, 1260 bp, Homo sapiens
  misc_feature 1..1260: note = indoleamine 2,3-dioxygenase (IDO) 2
  source 1..1260: mol_type = genomic DNA
atgttgcattttcattattatgatacttcaaacaaaataatggagccccacagaccgaatgtgaagacagcagtgccattgtctttggaaagctatcacatatctgaagagtatggctttcttcttccagattctctgaaagaacttccagatcattataggccttggatggaaattgccaacaaacttcctcaattgattgatgctcaccagcttcaagctcatgtggacaagatgcccctgctgagctgccagttcctgaagggtcaccgggagcagcgcctggcccacctggtcctgagcttcctcaccatgggttatgtctggcaggaaggagaggcgcagcctgcagaggtcctgccaaggaatcttgcccttccatttgtcgaagtctccaggaacttggggctccctcctatcctggtccactcagacttggtgctgacgaactggaccaaaaaagatccagacggattcctggaaattgggaacctggagaccatcatctcatttcctgggggagagagcctgcatggttttatactggtgactgctttggtagagaaagaagcagtgcctgggataaaggctcttgttcaggccacgaatgctatcttgcagcccaaccaggaggccctgctccaagccctgcagcgactgagactgtctattcaggacatcaccaaaaccttaggacagatgcatgattatgtagatccagacatattttatgcaggcatccggatctttctctctggatggaaagacaacccagcaatgcctgcagggctgatgtatgaaggagtttcccaagagcccctgaaatactccggcgggagtgcagctcagagcacagtgcttcatgcctttgatgagttcttaggcattcgtcatagcaaggaaagtggtgactttctgtacagaatgagggattacatgcctccttcccataaggccttcatagaagacatccactcagcaccttccctgagggactacatcctgtcatctggacaggaccacttgctgacagcttataaccagtgtgtgcaggccctggcagagctgcggagctatcacatcaccatggtcaccaaatacctcatcacagctgcagccaaggcaaagcatgggaagccaaaccatctcccagggcctcctcaggctttaaaagacaggggcacaggtggaaccgcagttatgagctttcttaagagtgtcagggataagaccttggagtcaatccttcacccacgtggt

SEQ ID NO: 57 - DNA, 2310 bp, Homo sapiens
  misc_feature 1..2310: note = signal transducer and activator of transcription 3(STAT3)
  source 1..2310: mol_type = genomic DNA
atggcccaatggaatcagctacagcagcttgacacacggtacctggagcagctccatcagctctacagtgacagcttcccaatggagctgcggcagtttctggccccttggattgagagtcaagattgggcatatgcggccagcaaagaatcacatgccactttggtgtttcataatctcctgggagagattgaccagcagtatagccgcttcctgcaagagtcgaatgttctctatcagcacaatctacgaagaatcaagcagtttcttcagagcaggtatcttgagaagccaatggagattgcccggattgtggcccggtgcctgtgggaagaatcacgccttctacagactgcagccactgcggcccagcaagggggccaggccaaccaccccacagcagccgtggtgacggagaagcagcagatgctggagcagcaccttcaggatgtccggaagagagtgcaggatctagaacagaaaatgaaagtggtagagaatctccaggatgactttgatttcaactataaaaccctcaagagtcaaggagacatgcaagatctgaatggaaacaaccagtcagtgaccaggcagaagatgcagcagctggaacagatgctcactgcgctggaccagatgcggagaagcatcgtgagtgagctggcggggcttttgtcagcgatggagtacgtgcagaaaactctcacggacgaggagctggctgactggaagaggcggcaacagattgcctgcattggaggcccgcccaacatctgcctagatcggctagaaaactggataacgtcattagcagaatctcaacttcagacccgtcaacaaattaagaaactggaggagttgcagcaaaaagtttcctacaaaggggaccccattgtacagcaccggccgatgctggaggagagaatcgtggagctgtttagaaacttaatgaaaagtgcctttgtggtggagcggcagccctgcatgcccatgcatcctgaccggcccctcgtcatcaagaccggcgtccagttcactactaaagtcaggttgctggtcaaattccctgagttgaattatcagcttaaaattaaagtgtgcattgacaaagactctggggacgttgcagctctcagaggatcccggaaatttaacattctgggcacaaacacaaaagtgatgaacatggaagaatccaacaacggcagcctctctgcagaattcaaacacttgaccctgagggagcagagatgtgggaatgggggccgagccaattgtgatgcttccctgattgtgactgaggagctgcacctgatcacctttgagaccgaggtgtatcaccaaggcctcaagattgacctagagacccactccttgccagttgtggtgatctccaacatctgtcagatgccaaatgcctgggcgtccatcctgtggtacaacatgctgaccaacaatcccaagaatgtaaacttttttaccaagcccccaattggaacctgggatcaagtggccgaggtcctgagctggcagttctcctccaccaccaagcgaggactgagcatcgagcagctgactacactggcagagaaactcttgggacctggtgtgaattattcagggtgtcagatcacatgggctaaattttgcaaagaaaacatggctggcaagggcttctccttctgggtctggctggacaatatcattgaccttgtgaaaaagtacatcctggccctttggaacgaagggtacatcatgggctttatcagtaaggagcgggagcgggccatcttgagcactaagcctccaggcaccttcctgctaagattcagtgaaagcagcaaagaaggaggcgtcactttcacttgggtggagaaggacatcagcggtaagacccagatccagtccgtggaaccatacacaaagcagcagctgaacaacatgtcatttgctgaaatcatcatgggctataagatcatggatgctaccaatatcctggtgtctccactggtctatctctatcctgacattcccaaggaggaggcattcggaaagtattgtcggccagagagccaggagcatcctgaagctgacccaggtagcgctgccccatacctgaagaccaagtttatctgtgtgacaccaacgacctgcagcaataccattgacctgccgatgtccccccgcactttagattcattgatgcagtttggaaataatggtgaaggtgctgaaccctcagcaggagggcagtttgagtccctcacctttgacatggagttgacctcggagtgcgctacctcccccatg

SEQ ID NO: 58 - DNA, 1575 bp, Homo sapiens
  misc_feature 1..1575: note = lymphocyte-activation gene 3 (LAG3)
  source 1..1575: mol_type = genomic DNA
atgtgggaggctcagttcctgggcttgctgtttctgcagccgctttgggtggctccagtgaagcctctccagccaggggctgaggtcccggtggtgtgggcccaggagggggctcctgcccagctcccctgcagccccacaatccccctccaggatctcagccttctgcgaagagcaggggtcacttggcagcatcagccagacagtggcccgcccgctgccgcccccggccatcccctggcccccggccctcacccggcggcgccctcctcctgggggcccaggccccgccgctacacggtgctgagcgtgggtcccggaggcctgcgcagcgggaggctgcccctgcagccccgcgtccagctggatgagcgcggccggcagcgcggggacttctcgctatggctgcgcccagcccggcgcgcggacgccggcgagtaccgcgccgcggtgcacctcagggaccgcgccctctcctgccgcctccgtctgcgcctgggccaggcctcgatgactgccagccccccaggatctctcagagcctccgactgggtcattttgaactgctccttcagccgccctgaccgcccagcctctgtgcattggttccggaaccggggccagggccgagtccctgtccgggagtccccccatcaccacttagcggaaagcttcctcttcctgccccaagtcagccccatggactctgggccctggggctgcatcctcacctacagagatggcttcaacgtctccatcatgtataacctcactgttctgggtctggagcccccaactcccttgacagtgtacgctggagcaggttccagggtggggctgccctgccgcctgcctgctggtgtggggacccggtctttcctcactgccaagtggactcctcctgggggaggccctgacctcctggtgactggagacaatggcgactttacccttcgactagaggatgtgagccaggcccaggctgggacctacacctgccatatccatctgcaggaacagcagctcaatgccactgtcacattggcaatcatcacagtgactcccaaatcctttgggtcacctggatccctggggaagctgctttgtgaggtgactccagtatctggacaagaacgctttgtgtggagctctctggacaccccatcccagaggagtttctcaggaccttggctggaggcacaggaggcccagctcctttcccagccttggcaatgccagctgtaccagggggagaggcttcttggagcagcagtgtacttcacagagctgtctagcccaggtgcccaacgctctgggagagccccaggtgccctcccagcaggccacctcctgctgtttctcatccttggtgtcctttctctgctccttttggtgactggagcctttggctttcacctttggagaagacagtggcgaccaagacgattttctgccttagagcaagggattcaccctccgcaggctcagagcaagatagaggagctggagcaagaaccggagccggagccggagccggaaccggagcccgagcccgagcccgagccggagcagctc

SEQ ID NO: 59 - DNA, 903 bp, Homo sapiens
  misc_feature 1..903: note = T cell immunoglobulin and mucin-domaincontaining-3 (TIM-3)
  source 1..903: mol_type = genomic DNA
atgttttcacatcttccctttgactgtgtcctgctgctgctgctgctactacttacaaggtcctcagaagtggaatacagagcggaggtcggtcagaatgcctatctgccctgcttctacaccccagccgccccagggaacctcgtgcccgtctgctggggcaaaggagcctgtcctgtgtttgaatgtggcaacgtggtgctcaggactgatgaaagggatgtgaattattggacatccagatactggctaaatggggatttccgcaaaggagatgtgtccctgaccatagagaatgtgactctagcagacagtgggatctactgctgccggatccaaatcccaggcataatgaatgatgaaaaatttaacctgaagttggtcatcaaaccagccaaggtcacccctgcaccgactcggcagagagacttcactgcagcctttccaaggatgcttaccaccaggggacatggcccagcagagacacagacactggggagcctccctgatataaatctaacacaaatatccacattggccaatgagttacgggactctagattggccaatgacttacgggactctggagcaaccatcagaataggcatctacatcggagcagggatctgtgctgggctggctctggctcttatcttcggcgctttaattttcaaatggtattctcatagcaaagagaagatacagaatttaagcctcatctctttggccaacctccctccctcaggattggcaaatgcagtagcagagggaattcgctcagaagaaaacatctataccattgaagagaacgtatatgaagtggaggagcccaatgagtattattgctatgtcagcagcaggcagcaaccctcacaacctttgggttgtcgctttgcaatgcca

SEQ ID NO: 60 - DNA, 732 bp, Homo sapiens
  misc_feature 1..732: note = T cell immunoreceptor with Ig and ITIM domains(TIGIT), isoform 1
  source 1..732: mol_type = genomic DNA
atgcgctggtgtctcctcctgatctgggcccaggggctgaggcaggctcccctcgcctcaggaatgatgacaggcacaatagaaacaacggggaacatttctgcagagaaaggtggctctatcatcttacaatgtcacctctcctccaccacggcacaagtgacccaggtcaactgggagcagcaggaccagcttctggccatttgtaatgctgacttggggtggcacatctccccatccttcaaggatcgagtggccccaggtcccggcctgggcctcaccctccagtcgctgaccgtgaacgatacaggggagtacttctgcatctatcacacctaccctgatgggacgtacactgggagaatcttcctggaggtcctagaaagctcagtggctgagcacggtgccaggttccagattccattgcttggagccatggccgcgacgctggtggtcatctgcacagcagtcatcgtggtggtcgcgttgactagaaagaagaaagccctcagaatccattctgtggaaggtgacctcaggagaaaatcagctggacaggaggaatggagccccagtgctccctcacccccaggaagctgtgtccaggcagaagctgcacctgctgggctctgtggagagcagcggggagaggactgtgccgagctgcatgactacttcaatgtcctgagttacagaagcctgggtaactgcagcttcttcacagagactggt

SEQ ID NO: 61 - DNA, 1065 bp, Homo sapiens
  misc_feature 1..1065: note = GALECTIN-9/LGALS9, isoform 1
  source 1..1065: mol_type = genomic DNA
atggccttcagcggttcccaggctccctacctgagtccagctgtccccttttctgggactattcaaggaggtctccaggacggacttcagatcactgtcaatgggaccgttctcagctccagtggaaccaggtttgctgtgaactttcagactggcttcagtggaaatgacattgccttccacttcaaccctcggtttgaagatggagggtacgtggtgtgcaacacgaggcagaacggaagctgggggcccgaggagaggaagacacacatgcctttccagaaggggatgccctttgacctctgcttcctggtgcagagctcagatttcaaggtgatggtgaacgggatcctcttcgtgcagtacttccaccgcgtgcccttccaccgtgtggacaccatctccgtcaatggctctgtgcagctgtcctacatcagcttccagaacccccgcacagtccctgttcagcctgccttctccacggtgccgttctcccagcctgtctgtttcccacccaggcccagggggcgcagacaaaaacctcccggcgtgtggcctgccaacccggctcccattacccagacagtcatccacacagtgcagagcgcccctggacagatgttctctactcccgccatcccacctatgatgtacccccaccccgcctatccgatgcctttcatcaccaccattctgggagggctgtacccatccaagtccatcctcctgtcaggcactgtcctgcccagtgctcagaggttccacatcaacctgtgctctgggaaccacatcgccttccacctgaacccccgttttgatgagaatgctgtggtccgcaacacccagatcgacaactcctgggggtctgaggagcgaagtctgccccgaaaaatgcccttcgtccgtggccagagcttctcagtgtggatcttgtgtgaagctcactgcctcaaggtggccgtggatggtcagcacctgtttgaatactaccatcgcctgaggaacctgcccaccatcaacagactggaagtggggggcgacatccagctgacccatgtgcagaca

SEQ ID NO: 62 - DNA, 720 bp, Homo sapiens
  misc_feature 1..720: note = LIGHT/TNSF14
  source 1..720: mol_type = genomic DNA
atggaggagagtgtcgtacggccctcagtgtttgtggtggatggacagaccgacatcccattcacgaggctgggacgaagccaccggagacagtcgtgcagtgtggcccgggtgggtctgggtctcttgctgttgctgatgggggccgggctggccgtccaaggctggttcctcctgcagctgcactggcgtctaggagagatggtcacccgcctgcctgacggacctgcaggctcctgggagcagctgatacaagagcgaaggtctcacgaggtcaacccagcagcgcatctcacaggggccaactccagcttgaccggcagcggggggccgctgttatgggagactcagctgggcctggccttcctgaggggcctcagctaccacgatggggcccttgtggtcaccaaagctggctactactacatctactccaaggtgcagctgggcggtgtgggctgcccgctgggcctggccagcaccatcacccacggcctctacaagcgcacaccccgctaccccgaggagctggagctgttggtcagccagcagtcaccctgcggacgggccaccagcagctcccgggtctggtgggacagcagcttcctgggtggtgtggtacacctggaggctggggagaaggtggtcgtccgtgtgctggatgaacgcctggttcgactgcgtgatggtacccggtcttacttcggggctttcatggtg

SEQ ID NO: 63 - DNA, 849 bp, Homo sapiens
  misc_feature 1..849: note = HVEM/TNSFR14 (receptor for LIGHT ligand)
  source 1..849: mol_type = genomic DNA
atggagcctcctggagactgggggcctcctccctggagatccacccccaaaaccgacgtcttgaggctggtgctgtatctcaccttcctgggagccccctgctacgccccagctctgccgtcctgcaaggaggacgagtacccagtgggctccgagtgctgccccaagtgcagtccaggttatcgtgtgaaggaggcctgcggggagctgacgggcacagtgtgtgaaccctgccctccaggcacctacattgcccacctcaatggcctaagcaagtgtctgcagtgccaaatgtgtgacccagccatgggcctgcgcgcgagccggaactgctccaggacagagaacgccgtgtgtggctgcagcccaggccacttctgcatcgtccaggacggggaccactgcgccgcgtgccgcgcttacgccacctccagcccgggccagagggtgcagaagggaggcaccgagagtcaggacaccctgtgtcagaactgccccccggggaccttctctcccaatgggaccctggaggaatgtcagcaccagaccaagtgcagctggctggtgacgaaggccggagctgggaccagcagctcccactgggtatggtggtttctctcagggagcctcgtcatcgtcattgtttgctccacagttggcctaatcatatgtgtgaaaagaagaaagccaaggggtgatgtagtcaaggtgatcgtctccgtccagcggaaaagacaggaggcagaaggtgaggccacagtcattgaggccctgcaggcccctccggacgtcaccacggtggccgtggaggagacaataccctcattcacggggaggagcccaaaccac

SEQ ID NO: 64 - DNA, 660 bp, Homo sapiens
  misc_feature 1..660: note = CD28
  source 1..660: mol_type = genomic DNA
atgctcaggctgctcttggctctcaacttattcccttcaattcaagtaacaggaaacaagattttggtgaagcagtcgcccatgcttgtagcgtacgacaatgcggtcaaccttagctgcaagtattcctacaatctcttctcaagggagttccgggcatcccttcacaaaggactggatagtgctgtggaagtctgtgttgtatatgggaattactcccagcagcttcaggtttactcaaaaacggggttcaactgtgatgggaaattgggcaatgaatcagtgacattctacctccagaatttgtatgttaaccaaacagatatttacttctgcaaaattgaagttatgtatcctcctccttacctagacaatgagaagagcaatggaaccattatccatgtgaaagggaaacacctttgtccaagtcccctatttcccggaccttctaagcccttttgggtgctggtggtggttggtggagtcctggcttgctatagcttgctagtaacagtggcctttattattttctgggtgaggagtaagaggagcaggctcctgcacagtgactacatgaacatgactccccgccgccccgggcccacccgcaagcattaccagccctatgccccaccacgcgacttcgcagcctatcgctcc

SEQ ID NO: 65 - DNA, 1578 bp, Homo sapiens
  misc_feature 1..1578: note = carcinoembryonic antigen-related cell adhesionmolecule 1 (CEACAM1, or CD66a)
  source 1..1578: mol_type = genomic DNA
atggggcacctctcagccccacttcacagagtgcgtgtaccctggcaggggcttctgctcacagcctcacttctaaccttctggaacccgcccaccactgcccagctcactactgaatccatgccattcaatgttgcagaggggaaggaggttcttctccttgtccacaatctgccccagcaactttttggctacagctggtacaaaggggaaagagtggatggcaaccgtcaaattgtaggatatgcaataggaactcaacaagctaccccagggcccgcaaacagcggtcgagagacaatataccccaatgcatccctgctgatccagaacgtcacccagaatgacacaggattctacaccctacaagtcataaagtcagatcttgtgaatgaagaagcaactggacagttccatgtatacccggagctgcccaagccctccatctccagcaacaactccaaccctgtggaggacaaggatgctgtggccttcacctgtgaacctgagactcaggacacaacctacctgtggtggataaacaatcagagcctcccggtcagtcccaggctgcagctgtccaatggcaacaggaccctcactctactcagtgtcacaaggaatgacacaggaccctatgagtgtgaaatacagaacccagtgagtgcgaaccgcagtgacccagtcaccttgaatgtcacctatggcccggacacccccaccatttccccttcagacacctattaccgtccaggggcaaacctcagcctctcctgctatgcagcctctaacccacctgcacagtactcctggcttatcaatggaacattccagcaaagcacacaagagctctttatccctaacatcactgtgaataatagtggatcctatacctgccacgccaataactcagtcactggctgcaacaggaccacagtcaagacgatcatagtcactgagctaagtccagtagtagcaaagccccaaatcaaagccagcaagaccacagtcacaggagataaggactctgtgaacctgacctgctccacaaatgacactggaatctccatccgttggttcttcaaaaaccagagtctcccgtcctcggagaggatgaagctgtcccagggcaacaccaccctcagcataaaccctgtcaagagggaggatgctgggacgtattggtgtgaggtcttcaacccaatcagtaagaaccaaagcgaccccatcatgctgaacgtaaactataatgctctaccacaagaaaatggcctctcacctggggccattgctggcattgtgattggagtagtggccctggttgctctgatagcagtagccctggcatgttttctgcatttcgggaagaccggcagggcaagcgaccagcgtgatctcacagagcacaaaccctcagtctccaaccacactcaggaccactccaatgacccacctaacaagatgaatgaagttacttattctaccctgaactttgaagcccagcaacccacacaaccaacttcagcctccccatccctaacagccacagaaataatttattcagaagtaaaaaagcag

SEQ ID NO: 66 - DNA, 864 bp, Homo sapiens
  misc_feature 1..864: note = CD80/B7-1
  source 1..864: mol_type = genomic DNA
atgggccacacacggaggcagggaacatcaccatccaagtgtccatacctcaatttctttcagctcttggtgctggctggtctttctcacttctgttcaggtgttatccacgtgaccaaggaagtgaaagaagtggcaacgctgtcctgtggtcacaatgtttctgttgaagagctggcacaaactcgcatctactggcaaaaggagaagaaaatggtgctgactatgatgtctggggacatgaatatatggcccgagtacaagaaccggaccatctttgatatcactaataacctctccattgtgatcctggctctgcgcccatctgacgagggcacatacgagtgtgttgttctgaagtatgaaaaagacgctttcaagcgggaacacctggctgaagtgacgttatcagtcaaagctgacttccctacacctagtatatctgactttgaaattccaacttctaatattagaaggataatttgctcaacctctggaggttttccagagcctcacctctcctggttggaaaatggagaagaattaaatgccatcaacacaacagtttcccaagatcctgaaactgagctctatgctgttagcagcaaactggatttcaatatgacaaccaaccacagcttcatgtgtctcatcaagtatggacatttaagagtgaatcagaccttcaactggaatacaaccaagcaagagcattttcctgataacctgctcccatcctgggccattaccttaatctcagtaaatggaatttttgtgatatgctgcctgacctactgctttgccccaagatgcagagagagaaggaggaatgagagattgagaagggaaagtgtacgccctgta

SEQ ID NO: 67 - DNA, 995 bp, Homo sapiens
  misc_feature 1..995: note = CD86/B7-2
  source 1..995: mol_type = genomic DNA
cagccaaaatggatccccagtgcactatgggactgagtaacattctctttgtgatggccttcctgctctctggtgctgctcctctgaagattcaagcttatttcaatgagactgcagacctgccatgccaatttgcaaactctcaaaaccaaagcctgagtgagctagtagtattttggcaggaccaggaaaacttggttctgaatgaggtatacttaggcaaagagaaatttgacagtgttcattccaagtatatgggccgcacaagttttgattcggacagttggaccctgagacttcacaatcttcagatcaaggacaagggcttgtatcaatgtatcatccatcacaaaaagcccacaggaatgattcgcatccaccagatgaattctgaactgtcagtgcttgctaacttcagtcaacctgaaatagtaccaatttctaatataacagaaaatgtgtacataaatttgacctgctcatctatacacggttacccagaacctaagaagatgagtgttttgctaagaaccaagaattcaactatcgagtatgatggtattatgcagaaatctcaagataatgtcacagaactgtacgacgtttccatcagcttgtctgtttcattccctgatgttacgagcaatatgaccatcttctgtattctggaaactgacaagacgcggcttttatcttcacctttctctatagagcttgaggaccctcagcctcccccagaccacattccttggattacagctgtacttccaacagttattatatgtgtgatggttttctgtctaattctatggaaatggaagaagaagaagcggcctcgcaactcttataaatgtggaaccaacacaatggagagggaagagagtgaacagaccaagaaaagagaaaaaatccatatacctgaaagatctgatgaagcccagcgtgtttttaaaagttcgaagacatcttcatgcgacaaaagtgatacatgtttt

SEQ ID NO: 68 - DNA, 1095 bp, Homo sapiens
  misc_feature 1..1095: note = CD244/2B4
  source 1..1095: mol_type = genomic DNA
atgctggggcaagtggtcaccctcatactcctcctgctcctcaaggtgtatcagggcaaaggatgccagggatcagctgaccatgtggttagcatctcgggagtgcctcttcagttacaaccaaacagcatacagacgaaggttgacagcattgcatggaagaagttgctgccctcacaaaatggatttcatcacatattgaagtgggagaatggctctttgccttccaatacttccaatgatagattcagttttatagtcaagaacttgagtcttctcatcaaggcagctcagcagcaggacagtggcctctactgcctggaggtcaccagtatatctggaaaagttcagacagccacgttccaggtttttgtatttgataaagttgagaaaccccgcctacaggggcaggggaagatcctggacagagggagatgccaagtggctctgtcttgcttggtctccagggatggcaatgtgtcctatgcttggtacagagggagcaagctgatccagacagcagggaacctcacctacctggacgaggaggttgacattaatggcactcacacatatacctgcaatgtcagcaatcctgttagctgggaaagccacaccctgaatctcactcaggactgtcagaatgcccatcaggaattcagattttggccgtttttggtgatcatcgtgattctaagcgcactgttccttggcacccttgcctgcttctgtgtgtggaggagaaagaggaaggagaagcagtcagagaccagtcccaaggaatttttgacaatttacgaagatgtcaaggatctgaaaaccaggagaaatcacgagcaggagcagacttttcctggaggggggagcaccatctactctatgatccagtcccagtcttctgctcccacgtcacaagaacctgcatatacattatattcattaattcagccttccaggaagtctggatccaggaagaggaaccacagcccttccttcaatagcactatctatgaagtgattggaaagagtcaacctaaagcccagaaccctgctcgattgagccgcaaagagctggagaactttgatgtttattcc

SEQ ID NO: 69 - DNA, 1251 bp, Homo sapiens
  misc_feature 1..1251: note = CD155/PVR
  source 1..1251: mol_type = genomic DNA
atggcccgagccatggccgccgcgtggccgctgctgctggtggcgctactggtgctgtcctggccacccccaggaaccggggacgtcgtcgtgcaggcgcccacccaggtgcccggcttcttgggcgactccgtgacgctgccctgctacctacaggtgcccaacatggaggtgacgcatgtgtcacagctgacttgggcgcggcatggtgaatctggcagcatggccgtcttccaccaaacgcagggccccagctattcggagtccaaacggctggaattcgtggcagccagactgggcgcggagctgcggaatgcctcgctgaggatgttcgggttgcgcgtagaggatgaaggcaactacacctgcctgttcgtcacgttcccgcagggcagcaggagcgtggatatctggctccgagtgcttgccaagccccagaacacagctgaggttcagaaggtccagctcactggagagccagtgcccatggcccgctgcgtctccacagggggtcgcccgccagcccaaatcacctggcactcagacctgggcgggatgcccaatacgagccaggtgccagggttcctgtctggcacagtcactgtcaccagcctctggatattggtgccctcaagccaggtggacggcaagaatgtgacctgcaaggtggagcacgagagctttgagaagcctcagctgctgactgtgaacctcaccgtgtactaccccccagaggtatccatctctggctatgataacaactggtaccttggccagaatgaggccaccctgacctgcgatgctcgcagcaacccagagcccacaggctataattggagcacgaccatgggtcccctgccaccctttgctgtggcccagggcgcccagctcctgatccgtcctgtggacaaaccaatcaacacaactttaatctgcaacgtcaccaatgccctaggagctcgccaggcagaactgaccgtccaggtcaaagagggacctcccagtgagcactcaggcatgtcccgtaacgccatcatcttcctggttctgggaatcctggtttttctgatcctgctggggatcgggatttatttctattggtccaaatgttcccgtgaggtcctttggcactgtcatctgtgtccctcgagtacagagcatgccagcgcctcagctaatgggcatgtctcctattcagctgtgagcagagagaacagctcttcccaggatccacagacagagggcacaagg

SEQ ID NO: 70 - DNA, 1614 bp, Homo sapiens
  misc_feature 1..1614: note = CD122/nectin-2
  source 1..1614: mol_type = genomic DNA
atggcccgggccgctgccctcctgccgtcgagatcgccgccgacgccgctgctgtggccgctgctgctgctgctgctcctggaaaccggagcccaggatgtgcgagttcaagtgctacccgaggtgcgaggccagctcgggggcaccgtggagctgccgtgccacctgctgccacctgttcctggactgtacatctccctggtgacctggcagcgcccagatgcacctgcgaaccaccagaatgtggccgccttccaccctaagatgggtcccagcttccccagcccgaagcctggcagcgagcggctgtccttcgtctctgccaagcagagcactgggcaagacacagaggcagagctccaggacgccacgctggccctccacgggctcacggtggaggacgagggcaactacacttgcgagtttgccaccttccccaaggggtccgtccgagggatgacctggctcagagtcatagccaagcccaagaaccaagctgaggcccagaaggtcacgttcagccaggaccctacgacagtggccctctgcatctccaaagagggccgcccacctgcccggatctcctggctctcatccctggactgggaagccaaagagactcaggtgtcagggaccctggccggaactgtcactgtcaccagccgcttcaccttggtgccctcgggccgagcagatggtgtcacggtcacctgcaaagtggagcatgagagcttcgaggaaccagccctgatacctgtgaccctctctgtacgctaccctcctgaagtgtccatctccggctatgatgacaactggtacctcggccgtactgatgccaccctgagctgtgacgtccgcagcaacccagagcccacgggctatgactggagcacgacctcaggcaccttcccgacctccgcagtggcccagggctcccagctggtcatccacgcagtggacagtctgttcaataccaccttcgtctgcacagtcaccaatgccgtgggcatgggccgcgctgagcaggtcatctttgtccgagagacccccaacacagcaggcgcaggggccacaggcggcatcatcgggggcatcatcgccgccatcattgctactgctgtggctgccacgggcatccttatctgccggcagcagcggaaggagcagacgctgcagggggcagaggaggacgaagacctggagggacctccctcctacaagccaccgaccccaaaagcgaagctggaggcacaggagatgccctcccagctcttcactctgggggcctcggagcacagcccactcaagaccccctactttgatgctggcgcctcatgcactgagcaggaaatgcctcgataccatgagctgcccaccttggaagaacggtcaggacccttgcaccctggagccacaagcctggggtcccccatcccggtgcctccagggccacctgctgtggaagacgtttccctggatctagaggatgaggagggggaggaggaggaagagtatctggacaagatcaaccccatctatgatgctctgtcctatagcagcccctctgattcctaccagggcaaaggctttgtcatgtcccgggccatgtatgtg

SEQ ID NO: 71 - DNA, 1008 bp, Homo sapiens
  misc_feature 1..1008: note = CD226 antigen
  source 1..1008: mol_type = genomic DNA
atggattatcctactttacttttggctcttcttcatgtatacagagctctatgtgaagaggtgctttggcatacatcagttccctttgccgagaacatgtctctagaatgtgtgtatccatcaatgggcatcttaacacaggtggagtggttcaagatcgggacccagcaggattccatagccattttcagccctactcatggcatggtcataaggaagccctatgctgagagggtttactttttgaattcaacgatggcttccaataacatgactcttttctttcggaatgcctctgaagatgatgttggctactattcctgctctctttacacttacccacagggaacttggcagaaggtgatacaggtggttcagtcagatagttttgaggcagctgtgccatcaaatagccacattgtttcggaacctggaaagaatgtcacactcacttgtcagcctcagatgacgtggcctgtgcaggcagtgaggtgggaaaagatccagccccgtcagatcgacctcttaacttactgcaacttggtccatggcagaaatttcacctccaagttcccaagacaaatagtgagcaactgcagccacggaaggtggagcgtcatcgtcatccccgatgtcacagtctcagactcggggctttaccgctgctacttgcaggccagcgcaggagaaaacgaaaccttcgtgatgagattgactgtagccgagggtaaaaccgataaccaatataccctctttgtggctggagggacagttttattgttgttgtttgttatctcaattaccaccatcattgtcattttccttaacagaaggagaaggagagagagaagagatctatttacagagtcctgggatacacagaaggcacccaataactatagaagtcccatctctaccagtcaacctaccaatcaatccatggatgatacaagagaggatatttatgtcaactatccaaccttctctcgcagaccaaagactagagtt

SEQ ID NO: 72 - DNA, 545 bp, Homo sapiens
  misc_feature 1..545: note = CD160 antigen
  source 1..545: mol_type = genomic DNA
ggatgctgttggaacccggcagaggctgctgtgccctggccatcctgctggcaattgtggacatccagtctggtggatgcattaacatcaccagctcagcttcccaggaaggaacgcgactaaacttaatctgtactgtatggcataagaaagaagaggctgaggggtttgtagtgtttttgtgcaaggacaggtctggagactgttctcctgagaccagtttaaaacagctgagacttaaaagggatcctgggatagatggtgttggtgaaatatcatctcagttgatgttcaccataagccaagtcacaccgttgcacagtgggacctaccagtgttgtgccagaagccagaagtcaggtatccgccttcagggccattttttctccattctattcacagagacagggaactacacagtgacgggattgaaacaaagacaacaccttgagttcagccataatgaaggcactctcagttcaggcttcctacaagaaaaggtctgggtaatgctggtcaccagccttgtggcccttcaagctttg

SEQ ID NO: 73 - DNA, 264 bp, Homo sapiens
  misc_feature 1..264: note = human U6 RNA Pol III promoter
  source 1..264: mol_type = genomic DNA
aaggtcgggcaggaagagggcctatttcccatgattccttcatatttgcatatacgatacaaggctgttagagagataattagaattaatttgactgtaaacacaaagatattagtacaaaatacgtgacgtagaaagtaataatttcttgggtagtttgcagttttaaaattatgttttaaaatggactatcatatgcttaccgtaacttgaaagtatttcgatttcttggctttatatatcttgtggaaaggacgaaactag

SEQ ID NO: 74 - DNA, 99 bp, Homo sapiens
  misc_feature 1..99: note = human H1 RNA Pol III promoter
  source 1..99: mol_type = genomic DNA
atatttgcatgtcgctatgtgttctgggaaatcaccataaacgtgaaatgtctttggatttgggaatcttataagttctgtatgagaccactccctagg

SEQ ID NO: 75 - DNA, 58 bp, synthetic construct
  misc_feature 1..58: note = shRNA-encoding sequence targeting muPD-L1
  source 1..58: mol_type = other DNA
ccggccgaaatgatacacaattcgactcgagtcgaattgtgtatcatttcggtttttg

SEQ ID NO: 76 - DNA, 57 bp, synthetic construct
  misc_feature 1..57: note = shRNA-encoding sequence targeting muSIRPA
  source 1..57: mol_type = other DNA
ccggccacaactggaatgtcttcatctcgagatgaagacattccagttgtggttttt

SEQ ID NO: 77 - DNA, 58 bp, synthetic construct
  misc_feature 1..58: note = shRNA-encoding sequence targeting muTREX1, clone 1
  source 1..58: mol_type = other DNA
ccggacaaccaacctaaggccacatctcgagatgtggccttaggttggttgttttttg

SEQ ID NO: 78 - DNA, 58 bp, synthetic construct
  misc_feature 1..58: note = shRNA-encoding sequence targeting muTREX1, clone 2
  source 1..58: mol_type = other DNA
ccggcctagatggtaccttctgtgtctcgagacacagaaggtaccatctaggtttttg

SEQ ID NO: 79 - DNA, 3966 bp, synthetic construct
  misc_feature 1..3966: note = Vector1-human shTREX1-1_shPDL1-1
  source 1..3966: mol_type = other DNA
ctttcctgcgttatcccctgattctgtggataaccgtattaccgcctttgagtgagctgataccgctcgccgcagccgaacgaccgagcgcagcgagtcagtgagcgaggaagcggaagagcgcccaatacgcaaaccgcctctccccgcgcgttggccgattcattaatgcagctggcacgacaggtttcccgactggaaagcgggcagtgagcgcaacgcaattaatacgcgtaccgctagccaggaagagtttgtagaaacgcaaaaaggccatccgtcaggatggccttctgcttagtttgatgcctggcagtttatggcgggcgtcctgcccgccaccctccgggccgttgcttcacaacgttcaaatccgctcccggcggatttgtcctactcaggagagcgttcaccgacaaacaacagataaaacgaaaggcccagtcttccgactgagcctttcgttttatttgatgcctggcagttccctactctcgcgttaacgctagcatggatgttttcccagtcacgacgttgtaaaacgacggccagtcttaagctcgggcccttaaaggaaccaattcagtcgagaattggtaccatatttgcatgtcgctatgtgttctgggaaatcaccataaacgtgaaatgtctttggatttgggaatcttataagttctgtatgagaccactccctaggcagcgcatgggcgtcaattctagagattgacgcccatgcgctgcttttttcgacagatctggcgcgccatagtggccagcggccgcaggtaagccagcccaggcctcgccctccagctcaaggcgggacaggtgccctagagtagcctgcatccagggacaggccccagccgggtgctgacacgtccacctccatctcttcctcaggtctgcccgggtggcatccctgtgacccctccccagtgcctctcctggccctggaagttgccactccagtgcccaccagccttgtcctaataaaattaagttgcatcattttgtctgactaggtgtccttctataatattatggggtggaggggggtggtatggagcaaggggcccaagttaacttgtttattgcagcttataatggttacaaataaagcaatagcatcacaaatttcacaaataaagcatttttttcactgcattctagttgtggtttgtccaaactcatcaatgtatcttatcatgtctggatccaaggtcgggcaggaagagggcctatttcccatgattccttcatatttgcatatacgatacaaggctgttagagagataattagaattaatttgactgtaaacacaaagatattagtacaaaatacgtgacgtagaaagtaataatttcttgggtagtttgcagttttaaaattatgttttaaaatggactatcatatgcttaccgtaacttgaaagtatttcgatttcttggctttatatatcttgtggaaaggacgaaactaggtagagtatggtagcaatatctagagtattgctaccatactctacttttttcgagtagctagagaattcatggtaatagcgatgactaatacgtagatgtactgccaagtaggaaagtcccataaggtcatgtactgggcataatgccaggcgggccatttaccgtcattgacgtcaatagggggcgtacttggcatatgatacacttgatgtactgccaagtgggcagtttaccgtaaatagtccacccattgacgtcaatggaaagtccctattggcgttactatgggaacatacgtcattattgacgtcaatgggcgggggtcgttgggcggtcagccaggcgggccatttaccgtaagttatgtaacgcggaactccatatatgggctatgaactaatgaccccgtaattgattactattaataactagccatccagctgatatcccatggtcatagctgtttcctggcagctctggcccgtgtctcaaaatctctgatgttacattgcacaagataaaaatatatcatcatgaacaataaaactgtctgcttacataaacagtaatacaaggggtgttatgaaaaatgttggttttatcggctggcgcggaatggtcggctctgttctcatgcaacgcatggtagaggagcgcgatttcgacgctattcgccctgttttcttttctacctcccagtttggacaggcggcgcccaccttcggcgacacctccaccggcacgctacaggacgcttttgatctggatgcgctaaaagcgctcgatatcatcgtgacctgccagggcggcgattataccaacgaaatttatccaaagctgcgcgaaagcggatggcagggttactggattgatgcggcttctacgctgcgcatgaaagatgatgccattattattctcgacccggtcaaccaggacgtgattaccgacggcctgaacaatggcgtgaagacctttgtgggcggtaactgtaccgttagcctgatgttgatgtcgctgggcggtctctttgcccataatctcgttgactgggtatccgtcgcgacctatcaggccgcctccggcggcggcgcgcgccatatgcgcgagctgttaacccagatgggtcagttgtatggccatgtcgccgatgaactggcgacgccgtcttccgcaattcttgatattgaacgcaaagttacggcattgacccgcagcggcgagctgccggttgataactttggcgtaccgctggcgggaagcctgatcccctggatcgacaaacagctcgataacggccagagccgcgaagagtggaaaggccaggcggaaaccaacaagattctcaatactgcctctgtgattccggttgatggtttgtgtgtgcgcgtcggcgcgctgcgctgtcacagccaggcgttcaccatcaagctgaaaaaagaggtatccattccgacggtggaagaactgctggcggcacataatccgtgggcgaaagtggtgccgaacgatcgtgatatcactatgcgcgaattaaccccggcggcggtgaccggcacgttgactacgccggttggtcgtctgcgtaagctgaacatggggccagagttcttgtcggcgtttaccgtaggcgaccagttgttatggggcgccgccgagccgctgcgtcgaatgctgcgccagttggcgtagtcagaattggttaattggttgtaacactggcagagcattacgctgacttgacgggacggcgcaagctcatgaccaaaatcccttaacgtgagttacgcgtcgttccactgagcgtcagaccccgtagaaaagatcaaaggatcttcttgagatcctttttttctgcgcgtaatctgctgcttgcaaacaaaaaaaccaccgctaccagcggtggtttgtttgccggatcaagagctaccaactctttttccgaaggtaactggcttcagcagagcgcagataccaaatactgtccttctagtgtagccgtagttaggccaccacttcaagaactctgtagcaccgcctacatacctcgctctgctaatcctgttaccagtggctgctgccagtggcgataagtcgtgtcttaccgggttggactcaagacgatagttaccggataaggcgcagcggtcgggctgaacggggggttcgtgcacacagcccagcttggagcgaacgacctacaccgaactgagatacctacagcgtgagcattgagaaagcgccacgcttcccgaagggagaaaggcggacaggtatccggtaagcggcagggtcggaacaggagagcgcacgagggagcttccagggggaaacgcctggtatctttatagtcctgtcgggtttcgccacctctgacttgagcgtcgatttttgtgatgctcgtcaggggggcggagcctatggaaaaacgccagcaacgcggcctttttacggttcctggccttttgctggccttttgct

SEQ ID NO: 80 - DNA, 3972 bp, synthetic construct
  misc_feature 1..3972: note = Vector2-mouse shTREX1-1_shPDL1-1
  source 1..3972: mol_type = other DNA
ctttcctgcgttatcccctgattctgtggataaccgtattaccgcctttgagtgagctgataccgctcgccgcagccgaacgaccgagcgcagcgagtcagtgagcgaggaagcggaagagcgcccaatacgcaaaccgcctctccccgcgcgttggccgattcattaatgcagctggcacgacaggtttcccgactggaaagcgggcagtgagcgcaacgcaattaatacgcgtaccgctagccaggaagagtttgtagaaacgcaaaaaggccatccgtcaggatggccttctgcttagtttgatgcctggcagtttatggcgggcgtcctgcccgccaccctccgggccgttgcttcacaacgttcaaatccgctcccggcggatttgtcctactcaggagagcgttcaccgacaaacaacagataaaacgaaaggcccagtcttccgactgagcctttcgttttatttgatgcctggcagttccctactctcgcgttaacgctagcatggatgttttcccagtcacgacgttgtaaaacgacggccagtcttaagctcgggcccttaaaggaaccaattcagtcgagaattggtaccatatttgcatgtcgctatgtgttctgggaaatcaccataaacgtgaaatgtctttggatttgggaatcttataagttctgtatgagaccactccctagacaaccaacctaaggccacatctcgagatgtggccttaggttggttgtttttttcgacagatctggcgcgccatagtggccagcggccgcaggtaagccagcccaggcctcgccctccagctcaaggcgggacaggtgccctagagtagcctgcatccagggacaggccccagccgggtgctgacacgtccacctccatctcttcctcaggtctgcccgggtggcatccctgtgacccctccccagtgcctctcctggccctggaagttgccactccagtgcccaccagccttgtcctaataaaattaagttgcatcattttgtctgactaggtgtccttctataatattatggggtggaggggggtggtatggagcaaggggcccaagttaacttgtttattgcagcttataatggttacaaataaagcaatagcatcacaaatttcacaaataaagcatttttttcactgcattctagttgtggtttgtccaaactcatcaatgtatcttatcatgtctggatccaaggtcgggcaggaagagggcctatttcccatgattccttcatatttgcatatacgatacaaggctgttagagagataattagaattaatttgactgtaaacacaaagatattagtacaaaatacgtgacgtagaaagtaataatttcttgggtagtttgcagttttaaaattatgttttaaaatggactatcatatgcttaccgtaacttgaaagtatttcgatttcttggctttatatatcttgtggaaaggacgaaactagccgaaatgatacacaattcgactcgagtcgaattgtgtatcatttcggttttttcgagtagctagagaattcatggtaatagcgatgactaatacgtagatgtactgccaagtaggaaagtcccataaggtcatgtactgggcataatgccaggcgggccatttaccgtcattgacgtcaatagggggcgtacttggcatatgatacacttgatgtactgccaagtgggcagtttaccgtaaatagtccacccattgacgtcaatggaaagtccctattggcgttactatgggaacatacgtcattattgacgtcaatgggcgggggtcgttgggcggtcagccaggcgggccatttaccgtaagttatgtaacgcggaactccatatatgggctatgaactaatgaccccgtaattgattactattaataactagccatccagctgatatcccatggtcatagctgtttcctggcagctctggcccgtgtctcaaaatctctgatgttacattgcacaagataaaaatatatcatcatgaacaataaaactgtctgcttacataaacagtaatacaaggggtgttatgaaaaatgttggttttatcggctggcgcggaatggtcggctctgttctcatgcaacgcatggtagaggagcgcgatttcgacgctattcgccctgttttcttttctacctcccagtttggacaggcggcgcccaccttcggcgacacctccaccggcacgctacaggacgcttttgatctggatgcgctaaaagcgctcgatatcatcgtgacctgccagggcggcgattataccaacgaaatttatccaaagctgcgcgaaagcggatggcagggttactggattgatgcggcttctacgctgcgcatgaaagatgatgccattattattctcgacccggtcaaccaggacgtgattaccgacggcctgaacaatggcgtgaagacctttgtgggcggtaactgtaccgttagcctgatgttgatgtcgctgggcggtctctttgcccataatctcgttgactgggtatccgtcgcgacctatcaggccgcctccggcggcggcgcgcgccatatgcgcgagctgttaacccagatgggtcagttgtatggccatgtcgccgatgaactggcgacgccgtcttccgcaattcttgatattgaacgcaaagttacggcattgacccgcagcggcgagctgccggttgataactttggcgtaccgctggcgggaagcctgatcccctggatcgacaaacagctcgataacggccagagccgcgaagagtggaaaggccaggcggaaaccaacaagattctcaatactgcctctgtgattccggttgatggtttgtgtgtgcgcgtcggcgcgctgcgctgtcacagccaggcgttcaccatcaagctgaaaaaagaggtatccattccgacggtggaagaactgctggcggcacataatccgtgggcgaaagtggtgccgaacgatcgtgatatcactatgcgcgaattaaccccggcggcggtgaccggcacgttgactacgccggttggtcgtctgcgtaagctgaacatggggccagagttcttgtcggcgtttaccgtaggcgaccagttgttatggggcgccgccgagccgctgcgtcgaatgctgcgccagttggcgtagtcagaattggttaattggttgtaacactggcagagcattacgctgacttgacgggacggcgcaagctcatgaccaaaatcccttaacgtgagttacgcgtcgttccactgagcgtcagaccccgtagaaaagatcaaaggatcttcttgagatcctttttttctgcgcgtaatctgctgcttgcaaacaaaaaaaccaccgctaccagcggtggtttgtttgccggatcaagagctaccaactctttttccgaaggtaactggcttcagcagagcgcagataccaaatactgtccttctagtgtagccgtagttaggccaccacttcaagaactctgtagcaccgcctacatacctcgctctgctaatcctgttaccagtggctgctgccagtggcgataagtcgtgtcttaccgggttggactcaagacgatagttaccggataaggcgcagcggtcgggctgaacggggggttcgtgcacacagcccagcttggagcgaacgacctacaccgaactgagatacctacagcgtgagcattgagaaagcgccacgcttcccgaagggagaaaggcggacaggtatccggtaagcggcagggtcggaacaggagagcgcacgagggagcttccagggggaaacgcctggtatctttatagtcctgtcgggtttcgccacctctgacttgagcgtcgatttttgtgatgctcgtcaggggggcggagcctatggaaaaacgccagcaacgcggcctttttacggttcctggccttttgctggccttttgct

SEQ ID NO: 81 - DNA, 1281 bp, Salmonella typhimurium
  misc_feature 1..1281: note = aroA
  source 1..1281: mol_type = genomic DNA
atggaatccctgacgttacaacccatcgcgcgggtcgatggcgccattaatttacctggctccaaaagtgtttcaaaccgtgctttgctcctggcggctttagcttgtggtaaaaccgctctgacgaatctgctggatagcgatgacgtccgccatatgctcaatgccctgagcgcgttggggatcaattacaccctttctgccgatcgcacccgctgtgatatcacgggtaatggcggcgcattacgtgcgccaggcgctctggaactgtttctcggtaatgccggaaccgcgatgcgtccgttagcggcagcgctatgtctggggcaaaatgagatagtgttaaccggcgaaccgcgtatgaaagagcgtccgataggccatctggtcgattcgctgcgtcagggcggggcgaatattgattacctggagcaggaaaactatccgcccctgcgtctgcgcggcggttttaccggcggcgacattgaggttgatggtagcgtttccagccagttcctgaccgctctgctgatgacggcgccgctggcccctaaagacacaattattcgcgttaaaggcgaactggtatcaaaaccttacatcgatatcacgctaaatttaatgaaaacctttggcgtggagatagcgaaccaccactaccaacaatttgtcgtgaagggaggtcaacagtatcactctccaggtcgctatctggtcgagggcgatgcctcgtcagcgtcctattttctcgccgctggggcgataaaaggcggcacggtaaaagtgaccggaattggccgcaaaagtatgcagggcgatattcgttttgccgatgtgctggagaaaatgggcgcgaccattacctggggcgatgattttattgcctgcacgcgcggtgaattgcacgccatagatatggatatgaaccatattccggatgcggcgatgacgattgccaccacggcgctgtttgcgaaaggaaccacgacgttgcgcaatatttataactggcgagtgaaagaaaccgatcgcctgttcgcgatggcgaccgagctacgtaaagtgggcgctgaagtcgaagaagggcacgactatattcgtatcacgccgccggcgaagctccaacacgcggatattggcacgtacaacgaccaccgtatggcgatgtgcttctcactggtcgcactgtccgatacgccagttacgatcctggaccctaaatgtaccgcaaaaacgttccctgattatttcgaacaactggcgcgaatgagtacgcctgcc

SEQ ID NO: 82 - DNA, 1094 bp, Salmonella typhimurium
  misc_feature 1..1094: note = aroC
  source 1..1094: mol_type = genomic DNA
acggagccgtgatggcaggaaacacaattggacaactctttcgcgtaaccactttcggcgaatcacacgggctggcgcttgggtgtatcgtcgatggcgtgccgcccggcatcccgttgacggaggccgatctgcaacacgatctcgacagacgccgccccggcacctcgcgctatactacccagcgccgcgaaccggaccaggtaaaaattctctccggcgtgtttgatggcgtgacgaccggcaccagcattggcctactgattgaaaacaccgatcagcgctcgcaggactacagcgcgattaaagatgtttttcgtccgggacacgcggattacacctatgagcagaaatacggcctgcgcgattaccgtggcggtggacgttcttccgcgcgtgaaaccgcgatgcgcgtagcggcaggggcgatcgccaagaaatacctggcggaaaagttcggcatcgaaatccgcggctgcctgacccagatgggcgacattccgctggagattaaagactggcgtcaggttgagcttaatccgttcttttgtcccgatgcggacaaacttgacgcgctggacgaactgatgcgcgcgctgaaaaaagagggtgactccatcggcgcgaaagtgacggtgatggcgagcggcgtgccggcagggcttggcgaaccggtatttgaccgactggatgcggacatcgcccatgcgctgatgagcattaatgcggtgaaaggcgtggagatcggcgaaggatttaacgtggtggcgctgcgcggcagccagaatcgcgatgaaatcacggcgcagggttttcagagcaaccacgctggcggcatcctcggtggcatcagtagcgggcaacacattgtggcgcatatggcgctgaaacctacctccagcattaccgtgccgggacgtacgatcaaccgggcaggtgaagaagtcgaaatgatcaccaaagggcgccacgatccgtgtgtggggattcgcgcagtgccgatcgcagaagccatgctggcgatcgtgctgatggatcacctgctgcgccatcgggcacagaatgcggatgtaaagacagagattccacgctgg

SEQ ID NO: 83 - DNA, 767 bp, Salmonella typhimurium
  misc_feature 1..767: note = aroD
  source 1..767: mol_type = genomic DNA
aagggtaccaaatgaaaaccgtaactgtaagagatctcgtggttggcgaaggcgcgccaaagatcattgtgtcgctaatgggaaaaaccattaccgatgtgaaatcggaagcactcgcctaccgtgaagcggatttcgatattctggagtggcgcgttgaccattttgccaacgtgacaacggcggaaagcgtacttgaggccgccggcgccatccgggagattattaccgataaacccttgctatttaccttccgcagcgcgaaagaaggcggcgaacaggcgctaaccaccggacagtatatcgatctgaatcgtgcagcggttgacagcggtctggtcgatatgatcgatcttgagctttttaccggcgacgatgaggtgaaagccaccgtcggctatgctcatcaacacaatgttgcggtgatcatgtctaaccatgattttcataaaacgcccgcagcggaagagattgttcagcgtctgcgtaaaatgcaggaactgggcgctgatattccgaagatcgccgtcatgccacagactaaagccgatgtcctgaccttacttaccgccactgtagaaatgcaggagcgctatgcggatcgtccgattattaccatgtcgatgtcgaaaaccggggtaatatctcgtcttgccggcgaagtgttcggttctgcggcaacgtttggcgcggtgaaaaaagcatctgcgccgggacaaatatcggtagccgatctgcgtaccgtattaactatattgcaccaggcg

SEQ ID NO: 84 - DNA, 684 bp, Salmonella typhimurium
  misc_feature 1..684: note = PhoP
  source 1..684: mol_type = genomic DNA
aagggagaagagatgatgcgcgtactggttgtagaggataatgcattattacgccaccacctgaaggttcagctccaggattcaggtcaccaggtcgatgccgcagaagatgccagggaagctgattactaccttaatgaacaccttccggatatcgctattgtcgatttaggtctgccggatgaagacggcctttccttaatacgccgctggcgcagcagtgatgtttcactgccggttctggtgttaaccgcgcgcgaaggctggcaggataaagtcgaggttctcagctccggggccgatgactacgtgacgaagccattccacatcgaagaggtaatggcgcgtatgcaggcgttaatgcgccgtaatagcggtctggcctcccaggtgatcaacatcccgccgttccaggtggatctctcacgccgggaattatccgtcaatgaagaggtcatcaaactcacggcgttcgaatacaccattatggaaacgcttatccgtaacaacggtaaagtggtcagcaaagattcgctgatgcttcagctgtatccggatgcggaactgcgggaaagtcataccattgatgttctcatggggcgtctgcggaaaaaaatacaggcccagtatccgcacgatgtcattaccaccgtacgcggacaaggatatctttttgaattgcgc

SEQ ID NO: 85 - DNA, 1461 bp, Salmonella typhimurium
  misc_feature 1..1461: note = PhoQ
  source 1..1461: mol_type = genomic DNA
atgaataaatttgctcgccattttctgccgctgtcgctgcgggttcgttttttgctggcgacagccggcgtcgtgctggtgctttctttggcatatggcatagtggcgctggtcggctatagcgtaagttttgataaaaccacctttcgtttgctgcgcggcgaaagcaacctgttttataccctcgccaaatgggaaaataataaaatcagcgttgagctgcctgaaaatctggacatgcaaagcccgaccatgacgctgatttacgatgaaacgggcaaattattatggacgcagcgcaacattccctggctgattaaaagcattcaaccggaatggttaaaaacgaacggcttccatgaaattgaaaccaacgtagacgccaccagcacgctgttgagcgaagaccattccgcgcaggaaaaactcaaagaagtacgtgaagatgacgatgatgccgagatgacccactcggtagcggtaaatatttatcctgccacggcgcggatgccgcagttaaccatcgtggtggtcgataccattccgatagaactaaaacgctcctatatggtgtggagctggttcgtatacgtgctggccgccaatttactgttagtcattcctttactgtggatcgccgcctggtggagcttacgccctatcgaggcgctggcgcgggaagtccgcgagcttgaagatcatcaccgcgaaatgctcaatccggagacgacgcgtgagctgaccagccttgtgcgcaaccttaatcaactgctcaaaagcgagcgtgaacgttataacaaataccgcacgaccctgaccgacctgacgcacagtttaaaaacgccgctcgcggttttgcagagtacgttacgctctttacgcaacgaaaagatgagcgtcagcaaagctgaaccggtgatgctggaacagatcagccggatttcccagcagatcggctattatctgcatcgcgccagtatgcgcggtagcggcgtgttgttaagccgcgaactgcatcccgtcgcgccgttgttagataacctgatttctgcgctaaataaagtttatcagcgtaaaggggtgaatatcagtatggatatttcaccagaaatcagttttgtcggcgagcaaaacgactttgtcgaagtgatgggcaacgtactggacaacgcttgtaaatattgtctggagtttgtcgagatttcggctcgccagaccgacgatcatttgcatattttcgtcgaagatgacggcccaggcattccccacagcaaacgttccctggtgtttgatcgcggtcagcgcgccgataccctacgaccaggacaaggcgtggggctggctgtcgcgcgcgagattacggaacaatacgccgggcagatcattgccagcgacagtctgctcggtggcgcccgtatggaggtcgtttttggccgacagcatcccacacagaaagaggaa

SEQ ID NO: 86 - DNA, 2731 bp, Salmonella typhimurium
  misc_feature 1..2731: note = Adenylate cyclase (cyaA)
  source 1..2731: mol_type = genomic DNA
tctttctttacggtcaatgagcaaggtgttaaattgatcacgttttagaccattttttcgtcggtattagataaaaatatgcaggcgagaaagggtaacggttatttttgacatacggtttatcccgaatggcgacggtcaagtactgacctgcaccatgacgggtagcaacatcaggcgatacgtcttgtacctctatattgagactctgaaacagagactggatgccataaatcaactgcgtgtggatcgcgcgcttgctgccatgggacccgcttttcagcaggtttacagtcttctgccgacattattgcactatcaccatccactgatgccgggttaccttgatggtaacgttcccagcggtatttgcttctacacgcctgatgaaacccaacgccactatctgaacgaacttgagctgtaccgcggtatgacgccgcaggacccgccgaagggcgagctgccgattaccggcgtttacaccatgggcagcacctcctcggtcgggcagagctgctcgtccgacctggatatctgggtgtgccatcagtcctggctcgacggcgaagagcgtcagttgctgcaacgtaagtgtagcctgctggaaagctgggccgcctcgcttggcgttgaggtgagcttcttcctgatcgacgagaaccgtttccgccataacgaaagcggcagtctgggcggggaagactgtggttctacgcagcatatcctgttgcttgatgagttttatcgtaccgctgtgcgcctggccgggaagcgtatcctgtggagtatggtgccgtgcgacgaagaagagcattacgacgactatgtcatgacgctctatgcgcagggcgtattaacgccaaacgaatggctggatctggggggcttaagctcgctctccgccgaagagtactttggcgccagcctgtggcagctatacaagagcattgactcgccgtacaaagcggtgctgaaaacgctgctgctggaagcctattcatgggaatatcctaacccacgtctgctggcgaaagatattaaacaacgtctgcatgacggtgaaatcgtatcgtttggactcgatccctactgcatgatgctggaacgggtcactgaatacctgacggcgattgaagatccgacgcggctggatttagtccgccgctgcttttacctgaaagtgtgcgagaaattaagtcgcgagcgtgcctgcgtaggctggcgtcgggaagtattaagccagttagtcagcgagtggggatgggacgacgcgcgtctgaccatgctcgataatcgcgcaaactggaaaatcgatcaggtgcgcgaagcccacaacgaattgctcgacgccatgatgcaaagctatcgtaatctgattcgctttgcgcggcgcaacaacctcagcgtgagtgccagcccgcaggatatcggcgtactgacgcgtaagctgtacgcggcttttgaagcgttgccgggtaaagtcacgctggtgaacccgcagatatcgccggatctgtccgagccgaatttaacctttatccatgtgccgccgggacgcgccaaccgttcaggctggtatctctacaaccgcgcgccgaacatggattccatcatcagccatcagccgctggaatataaccgttatcttaataagctggtcgcgtgggcgtggttcaacggcctgctgacgtcgcgaacgcatctgtttattaagggcaacggtattgtcgacctgcctaagttacaggagatggtcgccgatgtttcgcaccatttcccgctgcgcttgcctgctccgacgccgaaagcgctctacagcccctgtgaaattcgccatctggcgattatcgttaacctcgaatatgacccgacggcggcgtttcgcaataaagtggtccattttgacttccgtaagctggacgttttcagctttggcgaagagcaaaactgtctgataggcagtatcgacttgttatatcgcaactcgtggaacgaagtgcgtactctgcactttaacggcgagcaggcgatgatcgaagcgctgaaaacgattctggggaaaatgcaccaggatgccgcgccgccggatagcgtggaggtgttctgctacagtcagcatcttcgcggcctgattcgcacccgtgtgcagcaactggtctccgaatgtattgagctacgtctttccagcacccgtcaggagaccggtcgcttcaaggcgctgcgggtttccgggcagacgtgggggctattcttcgaacgcttgaatgtctcggtgcagaagctggagaacgctatcgaattctacggcgcgatttcgcataacaagctgcacgggctgtcggtacaggtggaaaccaaccaggtgaaattgccgtcagtggtggatggcttcgccagcgaagggattatccagttcttctttgaagaaacaggcgatgagaaaggctttaacatttatattctggatgaaagtaaccgggcggaagtatatcaccactgcgaaggtagcaaggaagaactggtgcgcgacgtcagtcgcttctattcgtcatcgcacgatcgcttcacgtatggctccagttttatcaactttaacctgccgcagttctaccagatagtgaaaaccgatggccgcgcgcaggtgatcccattccgtacgcagcctatcaacaccgtgccgccagcaaaccaggatcatgacgcgccgctattgcagcagtatttttcg

SEQ ID NO: 87 - DNA, 826 bp, Salmonella typhimurium
  misc_feature 1..826: note = cAMP-activated global transcriptional regulator(crp)
  source 1..826: mol_type = genomic DNA
aagctatgctaaaacagacaagatgctacagtaatacattgacgtactgcatgtatgcagaggacatcacattacaggctacaatctattttcgtagcccccttcccaggtagcgggaagtatatttttgcaaccccagagacagtgccgttttctggctctggagacagcttataacagaggataaccgcgcatggtgcttggcaaaccgcaaacagacccgactcttgaatggttcttgtctcattgccacattcataagtacccgtcaaagagcacgctgattcaccagggtgaaaaagcagaaacgctgtactacatcgttaaaggctccgtggcagtgctgatcaaagatgaagaagggaaagaaatgatcctttcttatctgaatcagggtgattttattggtgaactgggcctgtttgaagaaggccaggaacgcagcgcctgggtacgtgcgaaaaccgcatgtgaggtcgctgaaatttcctacaaaaaatttcgccaattaatccaggtcaacccggatattctgatgcgcctctcttcccagatggctcgtcgcttacaagtcacctctgaaaaagtaggtaacctcgccttccttgacgtcaccgggcgtatcgctcagacgctgctgaatctggcgaaacagcccgatgccatgacgcacccggatgggatgcagatcaaaatcactcgtcaggaaatcggccagatcgtcggctgctcccgcgaaaccgttggtcgtattttgaaaatgctggaagatcaaaacctgatctccgcgcatggcaagaccatcgtcgtctacggcacccgttaa

SEQ ID NO: 88 - DNA, 1566 bp, Homo sapiens
  misc_feature 1..1566: note = cyclic GMP-AMP (cGAMP) synthase (cGAS), isoform 1
  source 1..1566: mol_type = genomic DNA
atgcagccttggcacggaaaggccatgcagagagcttccgaggccggagccactgcccccaaggcttccgcacggaatgccaggggcgccccgatggatcccaccgagtctccggctgcccccgaggccgccctgcctaaggcgggaaagttcggccccgccaggaagtcgggatcccggcagaaaaagagcgccccggacacccaggagaggccgcccgtccgcgcaactggggcccgcgccaaaaaggcccctcagcgcgcccaggacacgcagccgtctgacgccaccagcgcccctggggcagaggggctggagcctcctgcggctcgggagccggctctttccagggctggttcttgccgccagaggggcgcgcgctgctccacgaagccaagacctccgcccgggccctgggacgtgcccagccccggcctgccggtctcggcccccattctcgtacggagggatgcggcgcctggggcctcgaagctccgggcggttttggagaagttgaagctcagccgcgatgatatctccacggcggcggggatggtgaaaggggttgtggaccacctgctgctcagactgaagtgcgactccgcgttcagaggcgtcgggctgctgaacaccgggagctactatgagcacgtgaagatttctgcacctaatgaatttgatgtcatgtttaaactggaagtccccagaattcaactagaagaatattccaacactcgtgcatattactttgtgaaatttaaaagaaatccgaaagaaaatcctctgagtcagtttttagaaggtgaaatattatcagcttctaagatgctgtcaaagtttaggaaaatcattaaggaagaaattaacgacattaaagatacagatgtcatcatgaagaggaaaagaggagggagccctgctgtaacacttcttattagtgaaaaaatatctgtggatataaccctggctttggaatcaaaaagtagctggcctgctagcacccaagaaggcctgcgcattcaaaactggctttcagcaaaagttaggaagcaactacgactaaagccattttaccttgtacccaagcatgcaaaggaaggaaatggtttccaagaagaaacatggcggctatccttctctcacatcgaaaaggaaattttgaacaatcatggaaaatctaaaacgtgctgtgaaaacaaagaagagaaatgttgcaggaaagattgtttaaaactaatgaaataccttttagaacagctgaaagaaaggtttaaagacaaaaaacatctggataaattctcttcttatcatgtgaaaactgccttctttcacgtatgtacccagaaccctcaagacagtcagtgggaccgcaaagacctgggcctctgctttgataactgcgtgacatactttcttcagtgcctcaggacagaaaaacttgagaattattttattcctgaattcaatctattctctagcaacttaattgacaaaagaagtaaagaatttctgacaaagcaaattgaatatgaaagaaacaatgagtttccagtttttgatgaattt

SEQ ID NO: 89 - DNA, 1137 bp, Homo sapiens
  misc_feature 1..1137: note = Stimulator of Interferon Genes (STING)(H232 Allele)
  source 1..1137: mol_type = genomic DNA
atgccccactccagcctgcatccatccatcccgtgtcccaggggtcacggggcccagaaggcagccttggttctgctgagtgcctgcctggtgaccctttgggggctaggagagccaccagagcacactctccggtacctggtgctccacctagcctccctgcagctgggactgctgttaaacggggtctgcagcctggctgaggagctgcgccacatccactccaggtaccggggcagctactggaggactgtgcgggcctgcctgggctgccccctccgccgtggggccctgttgctgctgtccatctatttctactactccctcccaaatgcggtcggcccgcccttcacttggatgcttgccctcctgggcctctcgcaggcactgaacatcctcctgggcctcaagggcctggccccagctgagatctctgcagtgtgtgaaaaagggaatttcaacgtggcccatgggctggcatggtcatattacatcggatatctgcggctgatcctgccagagctccaggcccggattcgaacttacaatcagcattacaacaacctgctacggggtgcagtgagccagcggctgtatattctcctcccattggactgtggggtgcctgataacctgagtatggctgaccccaacattcgcttcctggataaactgccccagcagaccggtgaccatgctggcatcaaggatcgggtttacagcaacagcatctatgagcttctggagaacgggcagcgggcgggcacctgtgtcctggagtacgccacccccttgcagactttgtttgccatgtcacaatacagtcaagctggctttagccgggaggataggcttgagcaggccaaactcttctgccggacacttgaggacatcctggcagatgcccctgagtctcagaacaactgccgcctcattgcctaccaggaacctgcagatgacagcagcttctcgctgtcccaggaggttctccggcacctgcggcaggaggaaaaggaagaggttactgtgggcagcttgaagacctcagcggtgcccagtacctccacgatgtcccaagagcctgagctcctcatcagtggaatggaaaagcccctccctctccgcacggatttctct

SEQ ID NO: 90 - DNA, 972 bp, Salmonella typhimurium
  misc_feature 1..972: note = lipid A biosynthesis myristoyltransferase (msbB)
  source 1..972: mol_type = genomic DNA
ttatttgatgggataaagatctttacgcttatacggctgaatctcgcctggcttgcgggttttgagcagcttcaggatccaggtgtactgttccggatgcgggccgacaaaaatttcgacctcttcgttcatccgtctggcgatagtgtggtcgtcagccgtgagcagatcgtccattggcgggcgaatctggatagtcaggcgatgcgttttaccattatacaccgggaaaagcggtatcacgcgtgcgcggcacactttcatcagccgaccaattgcaggcagcgtcgctttgtatgtcgcaaagaaatcaacgaattcactatgctccgggccgtgatcctggtccggcaggtagtaaccccagtagccctgacgaacagactgaataaagggtttaatcccgtcattacgcgcatgcaaacgtccgccgaaacgccgacgcactgtgttccagatatagtcaaaaaccggattaccctgattatgaaacatcgccgccattttttgcccctgagaggccatcagcatggctggaatgtcgacgccccagccatgcggtacgagaaaaatgactttttcgtcgttacgacgcatctcctcgataatctccagaccttcccagtcaacacgctgttgaatttttttcggaccgcgcatcgccaactcagccatcatcgccattgcctgtggcgcggtggcgaacatctcatcgacaatcgcttcgcgctcagcttcgctacgctgcggaaagcacaacgacagattaattagcgcccggcgacgagaactcttccccagccgtccggcaaaacgccccagcgtcgccagcaaagggtcgcggaatgatgccggtgttaatgcgatccccgccattgccgccgcgcccaaccaggcgccccaatactgtggatagcgaaaggatttttcgaattcagggatatactcactattattttttttggtttccat

SEQ ID NO: 91 - DNA, 1038 bp, Salmonella typhimurium
  misc_feature 1..1038: note = Phosphoribosylaminoimidazole synthetase (purI)
  source 1..1038: mol_type = genomic DNA
ttattcaataaccacacgctgttcggaatcagaggctttgatgataccgattttccatgcgttttcacctttctcgtttagcagagcaagcgctttgtccgcttccggagcggagagcgcaatcaccatgccgacgccgcagttaaaggtacggtacatttcatgtcggctgacattaccggcggtttgcagccaggtaaagatggcgggccactgccaggacgactcattaattaccgcctgggtattctccggcagaacgcgcggaatattttcccaaaagcccccgccggtgaggtgggcgatagcgtgtacatcgacgttttcaatcagttccagaaccgattttacgtagatacgggtcggttcaagcagatgatcggccagcggcttcccttccagcagagtggtttgtgggtcgcagccgctaacgtcaataattttccgcaccagcgaatatccattcgagtgcgggccgctggagccgagtgcaatcagcacgtcgccttcggcaacccgggagccgtcgatgatttctgatttttcgactacgccgacgcagaaacccgccacatcgtaatcttcgccgtgatacatgcccggcatttccgccgtctcgccgccgaccagcgcgcagccggattgcaggcagccttcggcaataccgttgatcacgctggcggcggtatcgacatccagtttacccgtggcatagtaatcgaggaaaaacagcggttccgcgccctgaacgaccagatcgtttacgcacattgccaccagatcaataccgatagcgtcgtgacgctttaagtccatcgccaggcgaagtttggtacctacgccgtcagtgccggaaaccagtaccggttcacgatatttttgcggcaacgcgcacagcgcaccgaaaccgcccagaccgcccataacctccgggcggcgagttttcttcactacgcctttgattcgatcaaccagagcgttacccgcatcaatatcgacgccggcatctttatagctaagagaggtcttatcggtcac

SEQ ID NO: 92 - DNA, 426 bp, Homo sapiens
  misc_feature 1..426: note = Survivin (SVN)/BIRC5, isoform 1
  source 1..426: mol_type = genomic DNA
atgggtgccccgacgttgccccctgcctggcagccctttctcaaggaccaccgcatctctacattcaagaactggcccttcttggagggctgcgcctgcaccccggagcggatggccgaggctggcttcatccactgccccactgagaacgagccagacttggcccagtgtttcttctgcttcaaggagctggaaggctgggagccagatgacgaccccatagaggaacataaaaagcattcgtccggttgcgctttcctttctgtcaagaagcagtttgaagaattaacccttggtgaatttttgaaactggacagagaaagagccaagaacaaaattgcaaaggaaaccaacaataagaagaaagaatttgaggaaactgcggagaaagtgcgccgtgccatcgagcagctggctgccatggat

SEQ ID NO: 93 - DNA, 285 bp, Escherichia coli
  misc_feature 1..285: note = araBAD promoter (pBAD)
  source 1..285: mol_type = genomic DNA
aagaaaccaattgtccatattgcatcagacattgccgtcactgcgtcttttactggctcttctcgctaaccaaaccggtaaccccgcttattaaaagcattctgtaacaaagcgggaccaaagccatgacaaaaacgcgtaacaaaagtgtctataatcacggcagaaaagtccacattgattatttgcacggcgtcacactttgctatgccatagcatttttatccataagattagcggatcttacctgacgctttttatcgcaactctctactgtttctccat

SEQ ID NO: 94 - DNA, 459 bp, Homo sapiens
  misc_feature 1..459: note = Interleukin 2 (IL-2)
  source 1..459: mol_type = genomic DNA
atgtacaggatgcaactcctgtcttgcattgcactaagtcttgcacttgtcacaaacagtgcacctacttcaagttctacaaagaaaacacagctacaactggagcatttactgctggatttacagatgattttgaatggaattaataattacaagaatcccaaactcaccaggatgctcacatttaagttttacatgcccaagaaggccacagaactgaaacatcttcagtgtctagaagaagaactcaaacctctggaggaagtgctaaatttagctcaaagcaaaaactttcacttaagacccagggacttaatcagcaatatcaacgtaatagttctggaactaaagggatctgaaacaacattcatgtgtgaatatgctgatgagacagcaaccattgtagaatttctgaacagatggattaccttttgtcaaagcatcatctcaacactgact

SEQ ID NO: 95 - DNA, 567 bp, Homo sapiens
  misc_feature 1..567: note = Interferon (IFN) alpha
  source 1..567: mol_type = genomic DNA
atggcctcgccctttgctttactgatggtcctggtggtgctcagctgcaagtcaagctgctctctgggctgtgatctccctgagacccacagcctggataacaggaggaccttgatgctcctggcacaaatgagcagaatctctccttcctcctgtctgatggacagacatgactttggatttccccaggaggagtttgatggcaaccagttccagaaggctccagccatctctgtcctccatgagctgatccagcagatcttcaacctctttaccacaaaagattcatctgctgcttgggatgaggacctcctagacaaattctgcaccgaactctaccagcagctgaatgacttggaagcctgtgtgatgcaggaggagagggtgggagaaactcccctgatgaatgcggactccatcttggctgtgaagaaatacttccgaagaatcactctctatctgacagagaagaaatacagcccttgtgcctgggaggttgtcagagcagaaatcatgagatccctctctttatcaacaaacttgcaagaaagattaaggaggaaggaa

SEQ ID NO: 96 - DNA, 729 bp, Homo sapiens
  misc_feature 1..729: note = CD48, isoform 1
  source 1..729: mol_type = genomic DNA
atgtgctccagaggttgggattcgtgtctggctctggaattgctactgctgcctctgtcactcctggtgaccagcattcaaggtcacttggtacatatgaccgtggtctccggcagcaacgtgactctgaacatctctgagagcctgcctgagaactacaaacaactaacctggttttatactttcgaccagaagattgtagaatgggattccagaaaatctaagtactttgaatccaaatttaaaggcagggtcagacttgatcctcagagtggcgcactgtacatctctaaggtccagaaagaggacaacagcacctacatcatgagggtgttgaaaaagactgggaatgagcaagaatggaagatcaagctgcaagtgcttgaccctgtacccaagcctgtcatcaaaattgagaagatagaagacatggatgacaactgttatctgaaactgtcatgtgtgatacctggcgagtctgtaaactacacctggtatggggacaaaaggcccttcccaaaggagctccagaacagtgtgcttgaaaccacccttatgccacataattactccaggtgttatacttgccaagtcagcaattctgtgagcagcaagaatggcacggtctgcctcagtccaccctgtaccctggcccggtcctttggagtagaatggattgcaagttggctagtggtcacggtgcccaccattcttggcctgttacttacc

SEQ ID NO: 97 - DNA, 1602 bp, Homo sapiens
  misc_feature 1..1602: note = CD276/B7-H3, isoform 1
  source 1..1602: mol_type = genomic DNA
atgctgcgtcggcggggcagccctggcatgggtgtgcatgtgggtgcagccctgggagcactgtggttctgcctcacaggagccctggaggtccaggtccctgaagacccagtggtggcactggtgggcaccgatgccaccctgtgctgctccttctcccctgagcctggcttcagcctggcacagctcaacctcatctggcagctgacagataccaaacagctggtgcacagctttgctgagggccaggaccagggcagcgcctatgccaaccgcacggccctcttcccggacctgctggcacagggcaacgcatccctgaggctgcagcgcgtgcgtgtggcggacgagggcagcttcacctgcttcgtgagcatccgggatttcggcagcgctgccgtcagcctgcaggtggccgctccctactcgaagcccagcatgaccctggagcccaacaaggacctgcggccaggggacacggtgaccatcacgtgctccagctaccagggctaccctgaggctgaggtgttctggcaggatgggcagggtgtgcccctgactggcaacgtgaccacgtcgcagatggccaacgagcagggcttgtttgatgtgcacagcatcctgcgggtggtgctgggtgcaaatggcacctacagctgcctggtgcgcaaccccgtgctgcagcaggatgcgcacagctctgtcaccatcacaccccagagaagccccacaggagccgtggaggtccaggtccctgaggacccggtggtggccctagtgggcaccgatgccaccctgcgctgctccttctcccccgagcctggcttcagcctggcacagctcaacctcatctggcagctgacagacaccaaacagctggtgcacagtttcaccgaaggccgggaccagggcagcgcctatgccaaccgcacggccctcttcccggacctgctggcacaaggcaatgcatccctgaggctgcagcgcgtgcgtgtggcggacgagggcagcttcacctgcttcgtgagcatccgggatttcggcagcgctgccgtcagcctgcaggtggccgctccctactcgaagcccagcatgaccctggagcccaacaaggacctgcggccaggggacacggtgaccatcacgtgctccagctaccggggctaccctgaggctgaggtgttctggcaggatgggcagggtgtgcccctgactggcaacgtgaccacgtcgcagatggccaacgagcagggcttgtttgatgtgcacagcgtcctgcgggtggtgctgggtgcgaatggcacctacagctgcctggtgcgcaaccccgtgctgcagcaggatgcgcacggctctgtcaccatcacagggcagcctatgacattccccccagaggccctgtgggtgaccgtggggctgtctgtctgtctcattgcactgctggtggccctggctttcgtgtgctggagaaagatcaaacagagctgtgaggaggagaatgcaggagctgaggaccaggatggggagggagaaggctccaagacagccctgcagcctctgaaacactctgacagcaaagaagatgatggacaagaaatagcc

SEQ ID NO: 98 - DNA, 846 bp, Homo sapiens
  misc_feature 1..846: note = B7-H4/VTCN1
  source 1..846: mol_type = genomic DNA
atggcttccctggggcagatcctcttctggagcataattagcatcatcattattctggctggagcaattgcactcatcattggctttggtatttcagggagacactccatcacagtcactactgtcgcctcagctgggaacattggggaggatggaatcctgagctgcacttttgaacctgacatcaaactttctgatatcgtgatacaatggctgaaggaaggtgttttaggcttggtccatgagttcaaagaaggcaaagatgagctgtcggagcaggatgaaatgttcagaggccggacagcagtgtttgctgatcaagtgatagttggcaatgcctctttgcggctgaaaaacgtgcaactcacagatgctggcacctacaaatgttatatcatcacttctaaaggcaaggggaatgctaaccttgagtataaaactggagccttcagcatgccggaagtgaatgtggactataatgccagctcagagaccttgcggtgtgaggctccccgatggttcccccagcccacagtggtctgggcatcccaagttgaccagggagccaacttctcggaagtctccaataccagctttgagctgaactctgagaatgtgaccatgaaggttgtgtctgtgctctacaatgttacgatcaacaacacatactcctgtatgattgaaaatgacattgccaaagcaacaggggatatcaaagtgacagaatcggagatcaaaaggcggagtcacctacagctgctaaactcaaaggcttctctgtgtgtctcttctttctttgccatcagctgggcacttctgcctctcagcccttacctgatgctaaaa

SEQ ID NO: 99 - DNA, 867 bp, Homo sapiens
  misc_feature 1..867: note = BTLA/CD272, isoform 1
  source 1..867: mol_type = genomic DNA
atgaagacattgcctgccatgcttggaactgggaaattattttgggtcttcttcttaatcccatatctggacatctggaacatccatgggaaagaatcatgtgatgtacagctttatataaagagacaatctgaacactccatcttagcaggagatccctttgaactagaatgccctgtgaaatactgtgctaacaggcctcatgtgacttggtgcaagctcaatggaacaacatgtgtaaaacttgaagatagacaaacaagttggaaggaagagaagaacatttcatttttcattctacattttgaaccagtgcttcctaatgacaatgggtcataccgctgttctgcaaattttcagtctaatctcattgaaagccactcaacaactctttatgtgacagatgtaaaaagtgcctcagaacgaccctccaaggacgaaatggcaagcagaccctggctcctgtatagtttacttcctttggggggattgcctctactcatcactacctgtttctgcctgttctgctgcctgagaaggcaccaaggaaagcaaaatgaactctctgacacagcaggaagggaaattaacctggttgatgctcaccttaagagtgagcaaacagaagcaagcaccaggcaaaattcccaagtactgctatcagaaactggaatttatgataatgaccctgacctttgtttcaggatgcaggaagggtctgaagtttattctaatccatgcctggaagaaaacaaaccaggcattgtttatgcttccctgaaccattctgtcattggaccgaactcaagactggcaagaaatgtaaaagaagcaccaacagaatatgcatccatatgtgtgaggagt

SEQ ID NO: 100 - DNA, 276 bp, Homo sapiens
  misc_feature 1..276: note = Chemokine (C-C motif) ligand 4 (CCL4)
  source 1..276: mol_type = genomic DNA
atgaagctctgcgtgactgtcctgtctctcctcatgctagtagctgccttctgctctccagcgctctcagcaccaatgggctcagaccctcccaccgcctgctgcttttcttacaccgcgaggaagcttcctcgcaactttgtggtagattactatgagaccagcagcctctgctcccagccagctgtggtattccaaaccaaaagaagcaagcaagtctgtgctgatcccagtgaatcctgggtccaggagtacgtgtatgacctggaactgaac

SEQ ID NO: 101 - DNA, 3537 bp, Homo sapiens
  misc_feature 1..3537: note = CD103/ITGAE
  source 1..3537: mol_type = genomic DNA
atgtggctcttccacactctgctctgcatagccagcctggccctgctggccgctttcaatgtggatgtggcccggccctggctcacgcccaagggaggtgcccctttcgtgctcagctcccttctgcaccaagaccccagcaccaaccagacctggctcctggtcaccagccccagaaccaagaggacaccagggcccctccatcgatgttcccttgtccaggatgaaatcctttgccatcctgtagagcatgtccccatccccaaggggaggcaccggggagtgaccgttgtccggagccaccacggtgttttgatatgcattcaagtgctggtccggcggcctcacagcctcagctcagaactcacaggcacctgtagcctcctgggccctgacctccgtccccaggctcaggccaacttcttcgaccttgaaaatctcctggatccagatgcacgtgtggacactggagactgctacagcaacaaagaaggcggtggagaagacgatgtgaacacagccaggcagcgccgggctctggagaaggaggaggaggaagacaaggaggaggaggaagacgaggaggaggaggaagctggcaccgagattgccatcatcctggatggctcaggaagcattgatcccccagactttcagagagccaaagacttcatctccaacatgatgaggaacttctatgaaaagtgttttgagtgcaactttgccttggtgcagtatggaggagtgatccagactgagtttgaccttcgggacagccaggatgtgatggcctccctcgccagagtccagaacatcactcaagtggggagtgtcaccaagactgcctcagccatgcaacacgtcttagacagcatcttcacctcaagccacggctccaggagaaaggcatccaaggtcatggtggtgctcaccgatggtggcatattcgaggaccccctcaaccttacgacagtcatcaactcccccaaaatgcagggtgttgagcgctttgccattggggtgggagaagaatttaagagtgctaggactgcgagggaactgaacctgatcgcctcagacccggatgagacccatgctttcaaggtgaccaactacatggcgctggatgggctgctgagcaaactgcggtacaacatcatcagcatggaaggcacggttggagacgcccttcactaccagctggcacagattggcttcagtgctcagatcctggatgagcggcaggtgctgctcggcgccgtcggggcctttgactggtccggaggggcgttgctctacgacacacgcagccgccggggccgcttcctgaaccagacagcggcggcggcggcagacgcggaggctgcgcagtacagctacctgggttacgctgtggccgtgctgcacaagacctgcagcctctcctacatcgcgggggctccacggtacaaacatcatggggccgtgtttgagctccagaaggagggcagagaggccagcttcctgccagtgctggagggagagcagatggggtcctattttggctctgagctgtgccctgtggacattgacatggatggaagcacggacttcttgctggtggctgctccattttaccacgttcatggagaagaaggcagagtctacgtgtaccgtctcagcgagcaggatggttctttctccttggcacgcatactgagtgggcaccccgggttcaccaatgcccgctttggctttgccatggcggctatgggggatctcagtcaggataagctcacagatgtggccatcggggcccccctggaaggttttggggcagatgatggtgccagcttcggcagtgtgtatatctacaatggacactgggacggcctctccgccagcccctcgcagcggatcagagcctccacggtggccccaggactccagtacttcggcatgtccatggctggtggctttgatattagtggcgacggccttgccgacatcaccgtgggcactctgggccaggcggttgtgttccgctcccggcctgtggttcgcctgaaggtctccatggccttcacccccagcgcactgcccatcggcttcaacggcgtcgtgaatgtccgtttatgttttgaaatcagctctgtaaccacagcctctgagtcaggcctccgcgaggcacttctcaacttcacgctggatgtggatgtggggaagcagaggagacggctgcagtgttcagacgtaagaagctgtctgggctgcctgagggagtggagcagcggatcccagctttgtgaggacctcctgctcatgcccacagagggagagctctgtgaggaggactgcttctccaatgccagtgtcaaagtcagctaccagctccagacccctgagggacagacggaccatccccagcccatcctggaccgctacactgagccctttgccatcttccagctgccctatgagaaggcctgcaagaataagctgttttgtgtcgcagaattacagttggccaccaccgtctctcagcaggagttggtggtgggtctcacaaaggagctgaccctgaacattaacctaactaactccggggaagattcctacatgacaagcatggccttgaattaccccagaaacctgcagttgaagaggatgcaaaagcctccctctccaaacattcagtgtgatgaccctcagccggttgcttctgtcctgatcatgaactgcaggattggtcaccccgtcctcaagaggtcatctgctcatgtttcagtcgtttggcagctagaggagaatgcctttccaaacaggacagcagacatcactgtgactgtcaccaattccaatgaaagacggtctttggccaacgagacccacacccttcaattcaggcatggcttcgttgcagttctgtccaaaccatccataatgtacgtgaacacaggccaggggctttctcaccacaaagaattcctcttccatgtacatggggagaacctctttggagcagaataccagttgcaaatttgcgtcccaaccaaattacgaggtctccaggttgtagcagtgaagaagctgacgaggactcaggcctccacggtgtgcacctggagtcaggagcgcgcttgtgcgtacagttcggttcagcatgtggaagaatggcattcagtgagctgtgtcatcgcttcagataaagaaaatgtcaccgtggctgcagagatctcctgggatcactctgaggagttactaaaagatgtaactgaactgcagatccttggtgaaatatctttcaacaaatctctatatgagggactgaatgcagagaaccacagaactaagatcactgtcgtcttcctgaaagatgagaagtaccattctttgcctatcatcattaaaggcagcgttggtggacttctggtgttgatcgtgattctggtcatcctgttcaagtgtggcttttttaaaagaaaatatcaacaactgaacttggagagcatcaggaaggcccagctgaaatcagagaatctgctcgaagaagagaat

SEQ ID NO: 102 - DNA, 1671 bp, Homo sapiens
  misc_feature 1..1671: note = CD19, isoform 1
  source 1..1671: mol_type = genomic DNA
atgccacctcctcgcctcctcttcttcctcctcttcctcacccccatggaagtcaggcccgaggaacctctagtggtgaaggtggaagagggagataacgctgtgctgcagtgcctcaaggggacctcagatggccccactcagcagctgacctggtctcgggagtccccgcttaaacccttcttaaaactcagcctggggctgccaggcctgggaatccacatgaggcccctggccatctggcttttcatcttcaacgtctctcaacagatggggggcttctacctgtgccagccggggcccccctctgagaaggcctggcagcctggctggacagtcaatgtggagggcagcggggagctgttccggtggaatgtttcggacctaggtggcctgggctgtggcctgaagaacaggtcctcagagggccccagctccccttccgggaagctcatgagccccaagctgtatgtgtgggccaaagaccgccctgagatctgggagggagagcctccgtgtctcccaccgagggacagcctgaaccagagcctcagccaggacctcaccatggcccctggctccacactctggctgtcctgtggggtaccccctgactctgtgtccaggggccccctctcctggacccatgtgcaccccaaggggcctaagtcattgctgagcctagagctgaaggacgatcgcccggccagagatatgtgggtaatggagacgggtctgttgttgccccgggccacagctcaagacgctggaaagtattattgtcaccgtggcaacctgaccatgtcattccacctggagatcactgctcggccagtactatggcactggctgctgaggactggtggctggaaggtctcagctgtgactttggcttatctgatcttctgcctgtgttcccttgtgggcattcttcatcttcaaagagccctggtcctgaggaggaaaagaaagcgaatgactgaccccaccaggagattcttcaaagtgacgcctcccccaggaagcgggccccagaaccagtacgggaacgtgctgtctctccccacacccacctcaggcctcggacgcgcccagcgttgggccgcaggcctggggggcactgccccgtcttatggaaacccgagcagcgacgtccaggcggatggagccttggggtcccggagcccgccgggagtgggcccagaagaagaggaaggggagggctatgaggaacctgacagtgaggaggactccgagttctatgagaacgactccaaccttgggcaggaccagctctcccaggatggcagcggctacgagaaccctgaggatgagcccctgggtcctgaggatgaagactccttctccaacgctgagtcttatgagaacgaggatgaagagctgacccagccggtcgccaggacaatggacttcctgagccctcatgggtcagcctgggaccccagccgggaagcaacctccctggcagggtcccagtcctatgaggatatgagaggaatcctgtatgcagccccccagctccgctccattcggggccagcctggacccaatcatgaggaagatgcagactcttatgagaacatggataatcccgatgggccagacccagcctggggaggagggggccgcatgggcacctggagcaccagg

SEQ ID NO: 103 - DNA, 579 bp, Homo sapiens
  misc_feature 1..579: note = Interleukin 18 (IL-18), isoform 1
  source 1..579: mol_type = genomic DNA
atggctgctgaaccagtagaagacaattgcatcaactttgtggcaatgaaatttattgacaatacgctttactttatagctgaagatgatgaaaacctggaatcagattactttggcaagcttgaatctaaattatcagtcataagaaatttgaatgaccaagttctcttcattgaccaaggaaatcggcctctatttgaagatatgactgattctgactgtagagataatgcaccccggaccatatttattataagtatgtataaagatagccagcctagaggtatggctgtaactatctctgtgaagtgtgagaaaatttcaactctctcctgtgagaacaaaattatttcctttaaggaaatgaatcctcctgataacatcaaggatacaaaaagtgacatcatattctttcagagaagtgtcccaggacatgataataagatgcaatttgaatcttcatcatacgaaggatactttctagcttgtgaaaaagagagagacctttttaaactcattttgaaaaaagaggatgaattgggggatagatctataatgttcactgttcaaaacgaagac

SEQ ID NO: 104 - DNA, 1005 bp, Homo sapiens
  misc_feature 1..1005: note = Fas ligand
  source 1..1005: mol_type = genomic DNA
atgctgggcatctggaccctcctacctctggttcttacgtctgttgctagattatcgtccaaaagtgttaatgcccaagtgactgacatcaactccaagggattggaattgaggaagactgttactacagttgagactcagaacttggaaggcctgcatcatgatggccaattctgccataagccctgtcctccaggtgaaaggaaagctagggactgcacagtcaatggggatgaaccagactgcgtgccctgccaagaagggaaggagtacacagacaaagcccatttttcttccaaatgcagaagatgtagattgtgtgatgaaggacatggcttagaagtggaaataaactgcacccggacccagaataccaagtgcagatgtaaaccaaactttttttgtaactctactgtatgtgaacactgtgacccttgcaccaaatgtgaacatggaatcatcaaggaatgcacactcaccagcaacaccaagtgcaaagaggaaggatccagatctaacttggggtggctttgtcttcttcttttgccaattccactaattgtttgggtgaagagaaaggaagtacagaaaacatgcagaaagcacagaaaggaaaaccaaggttctcatgaatctccaactttaaatcctgaaacagtggcaataaatttatctgatgttgacttgagtaaatatatcaccactattgctggagtcatgacactaagtcaagttaaaggctttgttcgaaagaatggtgtcaatgaagccaaaatagatgagatcaagaatgacaatgtccaagacacagcagaacagaaagttcaactgcttcgtaattggcatcaacttcatggaaagaaagaagcgtatgacacattgattaaagatctcaaaaaagccaatctttgtactcttgcagagaaaattcagactatcatcctcaaggacattactagtgactcagaaaattcaaacttcagaaatgaaatccaaagcttggtc

SEQ ID NO: 105 - DNA, 1023 bp, Salmonella typhimurium
  misc_feature 1..1023: note = firA/SSC
  source 1..1023: mol_type = genomic DNA
atgccttcaattcgactggctgacttagcagaacagttggatgcagaattacacggtgatggcgatatcgtcatcaccggcgttgcgtccatgcaatctgcaacaacaggccacattacgtttatggtgaatcctaagtaccgtgaacacttaggtttatgccaggcttctgcggttgtcatgacgcaggacgatcttccttttgctaagagtgcggcgctggtagttaaaaatccctacctgacctacgcgcgcatggcgcaaattttagatactacgccgcagcccgcgcagaatatcgcgccaagcgccgtgattgatgcgacggcaacgctgggtagcaatgtttcagtcggcgcgaatgcggtgattgaatctggcgtacaactgggcgataacgtggttatcggcgcaggctgtttcgtcggaaaaaatagcaaaatcggggcgggttcacgcttgtgggcgaacgtaacgatttaccacgacattcagatcggtgagaattgcctgatccagtccagtacggtgatcggcgcggacggttttggctacgctaacgatcgtggcaactgggtgaagatcccacaactgggccgggtcattattggcgatcgtgtcgagatcggcgcttgtaccaccattgaccgtggcgcgttggatgatactgttattggcaatggcgtgattattgataatcagtgccagattgcacataacgtcgtgattggcgacaatacggcagttgccggtggcgtcattatggcgggtagcctgaagattggccgttactgcatgattggcggcgccagcgtgatcaatgggcatatggaaatatgcgacaaagtcacggtaactggcatgggtatggtgatgcgtcccatcacggaaccgggcgtctactcctcaggcattccgctgcaacccaacaaagtatggcgtaaaactgctgcactggtgatgaacattgatgatatgagcaagcgtctcaaagcgattgagcgcaaggttaatcaacaagac

SEQ ID NO: 106 - DNA, 918 bp, Escherichia coli
  misc_feature 1..918: note = htrB
  source 1..918: mol_type = genomic DNA
atgacgaatctacccaagttctccaccgcactgcttcatccgcgttattggttaacctggttgggtattggcgtactttggttagtcgtgcaattgccctacccggttatctaccgcctcggttgtggattaggaaaactggcgttacgttttatgaaacgacgcgcaaaaattgtgcatcgcaacctggaactgtgcttcccggaaatgagcgaacaagaacgccgtaaaatggtggtgaagaatttcgaatccgttggcatgggcctgatggaaaccggcatggcgtggttctggccggaccgccgaatcgcccgctggacggaagtgatcggcatggaacacattcgtgacgtgcaggcgcaaaaacgcggcatcctgttagttggcatccattttctgacactggagctgggtgcgcggcagtttggtatgcaggaaccgggtattggcgtttatcgcccgaacgataatccactgattgactggctacaaacctggggccgtttgcgctcaaataaatcgatgctcgaccgcaaagatttaaaaggcatgattaaagccctgaaaaaaggcgaagtggtctggtacgcaccggatcatgattacggcccgcgctcaagcgttttcgtcccgttgtttgccgttgagcaggctgcgaccacgaccggaacctggatgctggcacggatgtccggcgcatgtctggtgcccttcgttccacgccgtaagccagatggcaaagggtatcaattgattatgctgccgccagagtgttctccgccactggatgatgccgaaactaccgccgcgtggatgaacaaagtggtcgaaaaatgcatcatgatggcaccagagcagtatatgtggttacaccgtcgctttaaaacacgcccggaaggcgttccttcacgctat

SEQ ID NO: 107 - DNA, 717 bp, Salmonella typhimurium
  misc_feature 1..717: note = ompR
  source 1..717: mol_type = genomic DNA
atgcaagagaattataagattctggtggttgatgacgatatgcgtctgcgggcgctactggaacgttatctgaccgagcagggcttccaggttcgaagcgtcgctaacgctgagcagatggatcgtctgctgacccgtgaatctttccatctcatggtactggatttaatgctgccaggtgaagatggtctgtcgatttgtcgtcgcctgcgtagtcaaagtaatccaatgccgatcattatggtcacggcgaagggtgaagaggttgaccgtatcgtcgggctggaaatcggcgccgatgactacattcctaaaccgtttaacccgcgcgagctgttggcgcgtattcggcccgtgttacgtcgtcaggcaaacgaactgcccggcgcgccgtcgcaggaagaggccgttatcgcgttcggtaagtttaaactgaacctcggtacgcgcgagatgttccgtgaagatgaaccgatgccgctgaccagcggggagtttgcggtactgaaagcgttagtcagccatccgcgcgagccgctctctcgcgataagctgatgaatctggcccgtggccgcgagtattccgcgatggaacgctccatcgacgtccagatctcccgcctgcgccgtatggtggaagaagatccggcacatccgcgttatattcagaccgtctggggcctgggctacgtctttgtaccggacggttctaaagca

SEQ ID NO: 108 - DNA, 498 bp, Homo sapiens
  misc_feature 1..498: note = Inteferon (IFN) gamma
  source 1..498: mol_type = genomic DNA
atgaaatatacaagttatatcttggcttttcagctctgcatcgttttgggttctcttggctgttactgccaggacccatatgtaaaagaagcagaaaaccttaagaaatattttaatgcaggtcattcagatgtagcggataatggaactcttttcttaggcattttgaagaattggaaagaggagagtgacagaaaaataatgcagagccaaattgtctccttttacttcaaactttttaaaaactttaaagatgaccagagcatccaaaagagtgtggagaccatcaaggaagacatgaatgtcaagtttttcaatagcaacaaaaagaaacgagatgacttcgaaaagctgactaattattcggtaactgacttgaatgtccaacgcaaagcaatacatgaactcatccaagtgatggctgaactgtcgccagcagctaaaacagggaagcgaaaaaggagtcagatgctgtttcgaggtcgaagagcatcccag

SEQ ID NO: 109 - DNA, 699 bp, Homo sapiens
  misc_feature 1..699: note = Tumor necrosis factor (TNF) alpha
  source 1..699: mol_type = genomic DNA
atgagcactgaaagcatgatccgggacgtggagctggccgaggaggcgctccccaagaagacaggggggccccagggctccaggcggtgcttgttcctcagcctcttctccttcctgatcgtggcaggcgccaccacgctcttctgcctgctgcactttggagtgatcggcccccagagggaagagttccccagggacctctctctaatcagccctctggcccaggcagtcagatcatcttctcgaaccccgagtgacaagcctgtagcccatgttgtagcaaaccctcaagctgaggggcagctccagtggctgaaccgccgggccaatgccctcctggccaatggcgtggagctgagagataaccagctggtggtgccatcagagggcctgtacctcatctactcccaggtcctcttcaagggccaaggctgcccctccacccatgtgctcctcacccacaccatcagccgcatcgccgtctcctaccagaccaaggtcaacctcctctctgccatcaagagcccctgccagagggagaccccagagggggctgaggccaagccctggtatgagcccatctatctgggaggggtcttccagctggagaagggtgaccgactcagcgctgagatcaatcggcccgactatctcgactttgccgagtctgggcaggtctactttgggatcattgccctg

SEQ ID NO: 110 - DNA, 825 bp, Homo sapiens
  misc_feature 1..825: note = Atg5 long isoform
  source 1..825: mol_type = genomic DNA
atgacagatgacaaagatgtgcttcgagatgtgtggtttggacgaattccaacttgtttcacgctatatcaggatgagataactgaaagggaagcagaaccatactatttgcttttgccaagagtaagttatttgacgttggtaactgacaaagtgaaaaagcactttcagaaggttatgagacaagaagacattagtgagatatggtttgaatatgaaggcacaccactgaaatggcattatccaattggtttgctatttgatcttcttgcatcaagttcagctcttccttggaacatcacagtacattttaagagttttccagaaaaagaccttctgcactgtccatctaaggatgcaattgaagctcattttatgtcatgtatgaaagaagctgatgctttaaaacataaaagtcaagtaatcaatgaaatgcagaaaaaagatcacaagcaactctggatgggattgcaaaatgacagatttgaccagttttgggccatcaatcggaaactcatggaatatcctgcagaagaaaatggatttcgttatatcccctttagaatatatcagacaacgactgaaagacctttcattcagaagctgtttcgtcctgtggctgcagatggacagttgcacacactaggagatctcctcaaagaagtttgtccttctgctattgatcctgaagatggggaaaaaaagaatcaagtgatgattcatggaattgagccaatgttggaaacacctctgcagtggctgagtgaacatctgagctacccggataattttcttcatattagtatcatcccacagccaacagat

SEQ ID NO: 111 - DNA, 1350 bp, Homo sapiens
  misc_feature 1..1350: note = Beclin1
  source 1..1350: mol_type = genomic DNA
atggaagggtctaagacgtccaacaacagcaccatgcaggtgagcttcgtgtgccagcgctgcagccagcccctgaaactggacacgagtttcaagatcctggaccgtgtcaccatccaggaactcacagctccattacttaccacagcccaggcgaaaccaggagagacccaggaggaagagactaactcaggagaggagccatttattgaaactcctcgccaggatggtgtctctcgcagattcatccccccagccaggatgatgtccacagaaagtgccaacagcttcactctgattggggaggcatctgatggcggcaccatggagaacctcagccgaagactgaaggtcactggggacctttttgacatcatgtcgggccagacagatgtggatcacccactctgtgaggaatgcacagatactcttttagaccagctggacactcagctcaacgtcactgaaaatgagtgtcagaactacaaacgctgtttggagatcttagagcaaatgaatgaggatgacagtgaacagttacagatggagctaaaggagctggcactagaggaggagaggctgatccaggagctggaagacgtggaaaagaaccgcaagatagtggcagaaaatctcgagaaggtccaggctgaggctgagagactggatcaggaggaagctcagtatcagagagaatacagtgaatttaaacgacagcagctggagctggatgatgagctgaagagtgttgaaaaccagatgcgttatgcccagacgcagctggataagctgaagaaaaccaacgtctttaatgcaaccttccacatctggcacagtggacagtttggcacaatcaataacttcaggctgggtcgcctgcccagtgttcccgtggaatggaatgagattaatgctgcttggggccagactgtgttgctgctccatgctctggccaataagatgggtctgaaatttcagagataccgacttgttccttacggaaaccattcatatctggagtctctgacagacaaatctaaggagctgccgttatactgttctggggggttgcggtttttctgggacaacaagtttgaccatgcaatggtggctttcctggactgtgtgcagcagttcaaagaagaggttgagaaaggcgagacacgtttttgtcttccctacaggatggatgtggagaaaggcaagattgaagacacaggaggcagtggcggctcctattccatcaaaacccagtttaactctgaggagcagtggacaaaagctctcaagttcatgctgacgaatcttaagtggggtcttgcttgggtgtcctcacaattttataacaaa

SEQ ID NO: 112 - DNA, 2352 bp, Homo sapiens
  misc_feature 1..2352: note = Toll-like receptor 2 (TLR2)
  source 1..2352: mol_type = genomic DNA
atgccacatactttgtggatggtgtgggtcttgggggtcatcatcagcctctccaaggaagaatcctccaatcaggcttctctgtcttgtgaccgcaatggtatctgcaagggcagctcaggatctttaaactccattccctcagggctcacagaagctgtaaaaagccttgacctgtccaacaacaggatcacctacattagcaacagtgacctacagaggtgtgtgaacctccaggctctggtgctgacatccaatggaattaacacaatagaggaagattctttttcttccctgggcagtcttgaacatttagacttatcctataattacttatctaatttatcgtcttcctggttcaagcccctttcttctttaacattcttaaacttactgggaaatccttacaaaaccctaggggaaacatctcttttttctcatctcacaaaattgcaaatcctgagagtgggaaatatggacaccttcactaagattcaaagaaaagattttgctggacttaccttccttgaggaacttgagattgatgcttcagatctacagagctatgagccaaaaagtttgaagtcaattcagaatgtaagtcatctgatccttcatatgaagcagcatattttactgctggagatttttgtagatgttacaagttccgtggaatgtttggaactgcgagatactgatttggacactttccatttttcagaactatccactggtgaaacaaattcattgattaaaaagtttacatttagaaatgtgaaaatcaccgatgaaagtttgtttcaggttatgaaacttttgaatcagatttctggattgttagaattagagtttgatgactgtacccttaatggagttggtaattttagagcatctgataatgacagagttatagatccaggtaaagtggaaacgttaacaatccggaggctgcatattccaaggttttacttattttatgatctgagcactttatattcacttacagaaagagttaaaagaatcacagtagaaaacagtaaagtttttctggttccttgtttactttcacaacatttaaaatcattagaatacttggatctcagtgaaaatttgatggttgaagaatacttgaaaaattcagcctgtgaggatgcctggccctctctacaaactttaattttaaggcaaaatcatttggcatcattggaaaaaaccggagagactttgctcactctgaaaaacttgactaacattgatatcagtaagaatagttttcattctatgcctgaaacttgtcagtggccagaaaagatgaaatatttgaacttatccagcacacgaatacacagtgtaacaggctgcattcccaagacactggaaattttagatgttagcaacaacaatctcaatttattttctttgaatttgccgcaactcaaagaactttatatttccagaaataagttgatgactctaccagatgcctccctcttacccatgttactagtattgaaaatcagtaggaatgcaataactacgttttctaaggagcaacttgactcatttcacacactgaagactttggaagctggtggcaataacttcatttgctcctgtgaattcctctccttcactcaggagcagcaagcactggccaaagtcttgattgattggccagcaaattacctgtgtgactctccatcccatgtgcgtggccagcaggttcaggatgtccgcctctcggtgtcggaatgtcacaggacagcactggtgtctggcatgtgctgtgctctgttcctgctgatcctgctcacgggggtcctgtgccaccgtttccatggcctgtggtatatgaaaatgatgtgggcctggctccaggccaaaaggaagcccaggaaagctcccagcaggaacatctgctatgatgcatttgtttcttacagtgagcgggatgcctactgggtggagaaccttatggtccaggagctggagaacttcaatccccccttcaagttgtgtcttcataagcgggacttcattcctggcaagtggatcattgacaatatcattgactccattgaaaagagccacaaaactgtctttgtgctttctgaaaactttgtgaagagtgagtggtgcaagtatgaactggacttctcccatttccgtctttttgatgagaacaatgatgctgccattctcattcttctggagcccattgagaaaaaagccattccccagcgcttctgcaagctgcggaagataatgaacaccaagacctacctggagtggcccatggacgaggctcagcgggaaggattttgggtaaatctgagagctgcgataaagtcc

SEQ ID NO: 113 - DNA, 2517 bp, Homo sapiens
  misc_feature 1..2517: note = TLR4, isoform 1
  source 1..2517: mol_type = genomic DNA
atgatgtctgcctcgcgcctggctgggactctgatcccagccatggccttcctctcctgcgtgagaccagaaagctgggagccctgcgtggaggtggttcctaatattacttatcaatgcatggagctgaatttctacaaaatccccgacaacctccccttctcaaccaagaacctggacctgagctttaatcccctgaggcatttaggcagctatagcttcttcagtttcccagaactgcaggtgctggatttatccaggtgtgaaatccagacaattgaagatggggcatatcagagcctaagccacctctctaccttaatattgacaggaaaccccatccagagtttagccctgggagccttttctggactatcaagtttacagaagctggtggctgtggagacaaatctagcatctctagagaacttccccattggacatctcaaaactttgaaagaacttaatgtggctcacaatcttatccaatctttcaaattacctgagtatttttctaatctgaccaatctagagcacttggacctttccagcaacaagattcaaagtatttattgcacagacttgcgggttctacatcaaatgcccctactcaatctctctttagacctgtccctgaaccctatgaactttatccaaccaggtgcatttaaagaaattaggcttcataagctgactttaagaaataattttgatagtttaaatgtaatgaaaacttgtattcaaggtctggctggtttagaagtccatcgtttggttctgggagaatttagaaatgaaggaaacttggaaaagtttgacaaatctgctctagagggcctgtgcaatttgaccattgaagaattccgattagcatacttagactactacctcgatgatattattgacttatttaattgtttgacaaatgtttcttcattttccctggtgagtgtgactattgaaagggtaaaagacttttcttataatttcggatggcaacatttagaattagttaactgtaaatttggacagtttcccacattgaaactcaaatctctcaaaaggcttactttcacttccaacaaaggtgggaatgctttttcagaagttgatctaccaagccttgagtttctagatctcagtagaaatggcttgagtttcaaaggttgctgttctcaaagtgattttgggacaaccagcctaaagtatttagatctgagcttcaatggtgttattaccatgagttcaaacttcttgggcttagaacaactagaacatctggatttccagcattccaatttgaaacaaatgagtgagttttcagtattcctatcactcagaaacctcatttaccttgacatttctcatactcacaccagagttgctttcaatggcatcttcaatggcttgtccagtctcgaagtcttgaaaatggctggcaattctttccaggaaaacttccttccagatatcttcacagagctgagaaacttgaccttcctggacctctctcagtgtcaactggagcagttgtctccaacagcatttaactcactctccagtcttcaggtactaaatatgagccacaacaacttcttttcattggatacgtttccttataagtgtctgaactccctccaggttcttgattacagtctcaatcacataatgacttccaaaaaacaggaactacagcattttccaagtagtctagctttcttaaatcttactcagaatgactttgcttgtacttgtgaacaccagagtttcctgcaatggatcaaggaccagaggcagctcttggtggaagttgaacgaatggaatgtgcaacaccttcagataagcagggcatgcctgtgctgagtttgaatatcacctgtcagatgaataagaccatcattggtgtgtcggtcctcagtgtgcttgtagtatctgttgtagcagttctggtctataagttctattttcacctgatgcttcttgctggctgcataaagtatggtagaggtgaaaacatctatgatgcctttgttatctactcaagccaggatgaggactgggtaaggaatgagctagtaaagaatttagaagaaggggtgcctccatttcagctctgccttcactacagagactttattcccggtgtggccattgctgccaacatcatccatgaaggtttccataaaagccgaaaggtgattgttgtggtgtcccagcacttcatccagagccgctggtgtatctttgaatatgagattgctcagacctggcagtttctgagcagtcgtgctggtatcatcttcattgtcctgcagaaggtggagaagaccctgctcaggcagcaggtggagctgtaccgccttctcagcaggaacacttacctggagtgggaggacagtgtcctggggcggcacatcttctggagacgactcagaaaagccctgctggatggtaaatcatggaatccagaaggaacagtgggtacaggatgcaattggcaggaagcaacatctatc

SEQ ID NO: 114 - DNA, 2574 bp, Homo sapiens
  misc_feature 1..2574: note = TLR5
  source 1..2574: mol_type = genomic DNA
atgggagaccacctggaccttctcctaggagtggtgctcatggccggtcctgtgtttggaattccttcctgctcctttgatggccgaatagccttttatcgtttctgcaacctcacccaggtcccccaggtcctcaacaccactgagaggctcctgctgagcttcaactatatcaggacagtcactgcttcatccttcccctttctggaacagctgcagctgctggagctcgggagccagtatacccccttgactattgacaaggaggccttcagaaacctgcccaaccttagaatcttggacctgggaagtagtaagatatacttcttgcatccagatgcttttcagggactgttccatctgtttgaacttagactgtatttctgtggtctctctgatgctgtattgaaagatggttatttcagaaatttaaaggctttaactcgcttggatctatccaaaaatcagattcgtagcctttaccttcatccttcatttgggaagttgaattccttaaagtccatagatttttcctccaaccaaatattccttgtatgtgaacatgagctcgagcccctacaagggaaaacgctctccttttttagcctcgcagctaatagcttgtatagcagagtctcagtggactggggaaaatgtatgaacccattcagaaacatggtgctggagatactagatgtttctggaaatggctggacagtggacatcacaggaaactttagcaatgccatcagcaaaagccaggccttctctttgattcttgcccaccacatcatgggtgccgggtttggcttccataacatcaaagatcctgaccagaacacatttgctggcctggccagaagttcagtgagacacctggatctttcacatgggtttgtcttctccctgaactcacgagtctttgagacactcaaggatttgaaggttctgaaccttgcctacaacaagataaataagattgcagatgaagcattttacggacttgacaacctccaagttctcaatttgtcatataaccttctgggggaactttacagttcgaatttctatggactacctaaggtagcctacattgatttgcaaaagaatcacattgcaataattcaagaccaaacattcaaattcctggaaaaattacagaccttggatctccgagacaatgctcttacaaccattcattttattccaagcatacccgatatcttcttgagtggcaataaactagtgactttgccaaagatcaaccttacagcgaacctcatccacttatcagaaaacaggctagaaaatctagatattctctactttctcctacgggtacctcatctccagattctcattttaaatcaaaatcgcttctcctcctgtagtggagatcaaaccccttcagagaatcccagcttagaacagcttttccttggagaaaatatgttgcaacttgcctgggaaactgagctctgttgggatgtttttgagggactttctcatcttcaagttctgtatttgaatcataactatcttaattcccttccaccaggagtatttagccatctgactgcattaaggggactaagcctcaactccaacaggctgacagttctttctcacaatgatttacctgctaatttagagatcctggacatatccaggaaccagctcctagctcctaatcctgatgtatttgtatcacttagtgtcttggatataactcataacaagttcatttgtgaatgtgaacttagcacttttatcaattggcttaatcacaccaatgtcactatagctgggcctcctgcagacatatattgtgtgtaccctgactcgttctctggggtttccctcttctctctttccacggaaggttgtgatgaagaggaagtcttaaagtccctaaagttctcccttttcattgtatgcactgtcactctgactctgttcctcatgaccatcctcacagtcacaaagttccggggcttctgttttatctgttataagacagcccagagactggtgttcaaggaccatccccagggcacagaacctgatatgtacaaatatgatgcctatttgtgcttcagcagcaaagacttcacatgggtgcagaatgctttgctcaaacacctggacactcaatacagtgaccaaaacagattcaacctgtgctttgaagaaagagactttgtcccaggagaaaaccgcattgccaatatccaggatgccatctggaacagtagaaagatcgtttgtcttgtgagcagacacttccttagagatggctggtgccttgaagccttcagttatgcccagggcaggtgcttatctgaccttaacagtgctctcatcatggtggtggttgggtccttgtcccagtaccagttgatgaaacatcaatccatcagaggctttgtacagaaacagcagtatttgaggtggcctgaggatctccaggatgttggctggtttcttcataaactctctcaacagatactaaagaaagaaaaagaaaagaagaaagacaataacattccgttgcaaactgtagcaaccatctcc

SEQ ID NO: 115 - DNA, 2712 bp, Homo sapiens
  misc_feature 1..2712: note = TLR3, isoform 1
  source 1..2712: mol_type = genomic DNA
atgagacagactttgccttgtatctacttttgggggggccttttgccctttgggatgctgtgtgcatcctccaccaccaagtgcactgttagccatgaagttgctgactgcagccacctgaagttgactcaggtacccgatgatctacccacaaacataacagtgttgaaccttacccataatcaactcagaagattaccagccgccaacttcacaaggtatagccagctaactagcttggatgtaggatttaacaccatctcaaaactggagccagaattgtgccagaaacttcccatgttaaaagttttgaacctccagcacaatgagctatctcaactttctgataaaacctttgccttctgcacgaatttgactgaactccatctcatgtccaactcaatccagaaaattaaaaataatccctttgtcaagcagaagaatttaatcacattagatctgtctcataatggcttgtcatctacaaaattaggaactcaggttcagctggaaaatctccaagagcttctattatcaaacaataaaattcaagcgctaaaaagtgaagaactggatatctttgccaattcatctttaaaaaaattagagttgtcatcgaatcaaattaaagagttttctccagggtgttttcacgcaattggaagattatttggcctctttctgaacaatgtccagctgggtcccagccttacagagaagctatgtttggaattagcaaacacaagcattcggaatctgtctctgagtaacagccagctgtccaccaccagcaatacaactttcttgggactaaagtggacaaatctcactatgctcgatctttcctacaacaacttaaatgtggttggtaacgattcctttgcttggcttccacaactagaatatttcttcctagagtataataatatacagcatttgttttctcactctttgcacgggcttttcaatgtgaggtacctgaatttgaaacggtcttttactaaacaaagtatttcccttgcctcactccccaagattgatgatttttcttttcagtggctaaaatgtttggagcaccttaacatggaagataatgatattccaggcataaaaagcaatatgttcacaggattgataaacctgaaatacttaagtctatccaactcctttacaagtttgcgaactttgacaaatgaaacatttgtatcacttgctcattctcccttacacatactcaacctaaccaagaataaaatctcaaaaatagagagtgatgctttctcttggttgggccacctagaagtacttgacctgggccttaatgaaattgggcaagaactcacaggccaggaatggagaggtctagaaaatattttcgaaatctatctttcctacaacaagtacctgcagctgactaggaactcctttgccttggtcccaagccttcaacgactgatgctccgaagggtggcccttaaaaatgtggatagctctccttcaccattccagcctcttcgtaacttgaccattctggatctaagcaacaacaacatagccaacataaatgatgacatgttggagggtcttgagaaactagaaattctcgatttgcagcataacaacttagcacggctctggaaacacgcaaaccctggtggtcccatttatttcctaaagggtctgtctcacctccacatccttaacttggagtccaacggctttgacgagatcccagttgaggtcttcaaggatttatttgaactaaagatcatcgatttaggattgaataatttaaacacacttccagcatctgtctttaataatcaggtgtctctaaagtcattgaaccttcagaagaatctcataacatccgttgagaagaaggttttcgggccagctttcaggaacctgactgagttagatatgcgctttaatccctttgattgcacgtgtgaaagtattgcctggtttgttaattggattaacgagacccataccaacatccctgagctgtcaagccactacctttgcaacactccacctcactatcatgggttcccagtgagactttttgatacatcatcttgcaaagacagtgccccctttgaactctttttcatgatcaataccagtatcctgttgatttttatctttattgtacttctcatccactttgagggctggaggatatctttttattggaatgtttcagtacatcgagttcttggtttcaaagaaatagacagacagacagaacagtttgaatatgcagcatatataattcatgcctataaagataaggattgggtctgggaacatttctcttcaatggaaaaggaagaccaatctctcaaattttgtctggaagaaagggactttgaggcgggtgtttttgaactagaagcaattgttaacagcatcaaaagaagcagaaaaattatttttgttataacacaccatctattaaaagacccattatgcaaaagattcaaggtacatcatgcagttcaacaagctattgaacaaaatctggattccattatattggttttccttgaggagattccagattataaactgaaccatgcactctgtttgcgaagaggaatgtttaaatctcactgcatcttgaactggccagttcagaaagaacggataggtgcctttcgtcataaattgcaagtagcacttggatccaaaaactctgtacat

SEQ ID NO: 116 - DNA, 3096 bp, Homo sapiens
  misc_feature 1..3096: note = TLR9
  source 1..3096: mol_type = genomic DNA
atgggtttctgccgcagcgccctgcacccgctgtctctcctggtgcaggccatcatgctggccatgaccctggccctgggtaccttgcctgccttcctaccctgtgagctccagccccacggcctggtgaactgcaactggctgttcctgaagtctgtgccccacttctccatggcagcaccccgtggcaatgtcaccagcctttccttgtcctccaaccgcatccaccacctccatgattctgactttgcccacctgcccagcctgcggcatctcaacctcaagtggaactgcccgccggttggcctcagccccatgcacttcccctgccacatgaccatcgagcccagcaccttcttggctgtgcccaccctggaagagctaaacctgagctacaacaacatcatgactgtgcctgcgctgcccaaatccctcatatccctgtccctcagccataccaacatcctgatgctagactctgccagcctcgccggcctgcatgccctgcgcttcctattcatggacggcaactgttattacaagaacccctgcaggcaggcactggaggtggccccgggtgccctccttggcctgggcaacctcacccacctgtcactcaagtacaacaacctcactgtggtgccccgcaacctgccttccagcctggagtatctgctgttgtcctacaaccgcatcgtcaaactggcgcctgaggacctggccaatctgaccgccctgcgtgtgctcgatgtgggcggaaattgccgccgctgcgaccacgctcccaacccctgcatggagtgccctcgtcacttcccccagctacatcccgataccttcagccacctgagccgtcttgaaggcctggtgttgaaggacagttctctctcctggctgaatgccagttggttccgtgggctgggaaacctccgagtgctggacctgagtgagaacttcctctacaaatgcatcactaaaaccaaggccttccagggcctaacacagctgcgcaagcttaacctgtccttcaattaccaaaagagggtgtcctttgcccacctgtctctggccccttccttcgggagcctggtcgccctgaaggagctggacatgcacggcatcttcttccgctcactcgatgagaccacgctccggccactggcccgcctgcccatgctccagactctgcgtctgcagatgaacttcatcaaccaggcccagctcggcatcttcagggccttccctggcctgcgctacgtggacctgtcggacaaccgcatcagcggagcttcggagctgacagccaccatgggggaggcagatggaggggagaaggtctggctgcagcctggggaccttgctccggccccagtggacactcccagctctgaagacttcaggcccaactgcagcaccctcaacttcaccttggatctgtcacggaacaacctggtgaccgtgcagccggagatgtttgcccagctctcgcacctgcagtgcctgcgcctgagccacaactgcatctcgcaggcagtcaatggctcccagttcctgccgctgaccggtctgcaggtgctagacctgtcccacaataagctggacctctaccacgagcactcattcacggagctaccgcgactggaggccctggacctcagctacaacagccagccctttggcatgcagggcgtgggccacaacttcagcttcgtggctcacctgcgcaccctgcgccacctcagcctggcccacaacaacatccacagccaagtgtcccagcagctctgcagtacgtcgctgcgggccctggacttcagcggcaatgcactgggccatatgtgggccgagggagacctctatctgcacttcttccaaggcctgagcggtttgatctggctggacttgtcccagaaccgcctgcacaccctcctgccccaaaccctgcgcaacctccccaagagcctacaggtgctgcgtctccgtgacaattacctggccttctttaagtggtggagcctccacttcctgcccaaactggaagtcctcgacctggcaggaaaccagctgaaggccctgaccaatggcagcctgcctgctggcacccggctccggaggctggatgtcagctgcaacagcatcagcttcgtggcccccggcttcttttccaaggccaaggagctgcgagagctcaaccttagcgccaacgccctcaagacagtggaccactcctggtttgggcccctggcgagtgccctgcaaatactagatgtaagcgccaaccctctgcactgcgcctgtggggcggcctttatggacttcctgctggaggtgcaggctgccgtgcccggtctgcccagccgggtgaagtgtggcagtccgggccagctccagggcctcagcatctttgcacaggacctgcgcctctgcctggatgaggccctctcctgggactgtttcgccctctcgctgctggctgtggctctgggcctgggtgtgcccatgctgcatcacctctgtggctgggacctctggtactgcttccacctgtgcctggcctggcttccctggcgggggcggcaaagtgggcgagatgaggatgccctgccctacgatgccttcgtggtcttcgacaaaacgcagagcgcagtggcagactgggtgtacaacgagcttcgggggcagctggaggagtgccgtgggcgctgggcactccgcctgtgcctggaggaacgcgactggctgcctggcaaaaccctctttgagaacctgtgggcctcggtctatggcagccgcaagacgctgtttgtgctggcccacacggaccgggtcagtggtctcttgcgcgccagcttcctgctggcccagcagcgcctgctggaggaccgcaaggacgtcgtggtgctggtgatcctgagccctgacggccgccgctcccgctacgtgcggctgcgccagcgcctctgccgccagagtgtcctcctctggccccaccagcccagtggtcagcgcagcttctgggcccagctgggcatggccctgaccagggacaaccaccacttctataaccggaacttctgccagggacccacggccgaa

SEQ ID NO: 117 - DNA, 3147 bp, Homo sapiens
  misc_feature 1..3147: note = TLR7
  source 1..3147: mol_type = genomic DNA
atggtgtttccaatgtggacactgaagagacaaattcttatcctttttaacataatcctaatttccaaactccttggggctagatggtttcctaaaactctgccctgtgatgtcactctggatgttccaaagaaccatgtgatcgtggactgcacagacaagcatttgacagaaattcctggaggtattcccacgaacaccacgaacctcaccctcaccattaaccacataccagacatctccccagcgtcctttcacagactggaccatctggtagagatcgatttcagatgcaactgtgtacctattccactggggtcaaaaaacaacatgtgcatcaagaggctgcagattaaacccagaagctttagtggactcacttatttaaaatccctttacctggatggaaaccagctactagagataccgcagggcctcccgcctagcttacagcttctcagccttgaggccaacaacatcttttccatcagaaaagagaatctaacagaactggccaacatagaaatactctacctgggccaaaactgttattatcgaaatccttgttatgtttcatattcaatagagaaagatgccttcctaaacttgacaaagttaaaagtgctctccctgaaagataacaatgtcacagccgtccctactgttttgccatctactttaacagaactatatctctacaacaacatgattgcaaaaatccaagaagatgattttaataacctcaaccaattacaaattcttgacctaagtggaaattgccctcgttgttataatgccccatttccttgtgcgccgtgtaaaaataattctcccctacagatccctgtaaatgcttttgatgcgctgacagaattaaaagttttacgtctacacagtaactctcttcagcatgtgcccccaagatggtttaagaacatcaacaaactccaggaactggatctgtcccaaaacttcttggccaaagaaattggggatgctaaatttctgcattttctccccagcctcatccaattggatctgtctttcaattttgaacttcaggtctatcgtgcatctatgaatctatcacaagcattttcttcactgaaaagcctgaaaattctgcggatcagaggatatgtctttaaagagttgaaaagctttaacctctcgccattacataatcttcaaaatcttgaagttcttgatcttggcactaactttataaaaattgctaacctcagcatgtttaaacaatttaaaagactgaaagtcatagatctttcagtgaataaaatatcaccttcaggagattcaagtgaagttggcttctgctcaaatgccagaacttctgtagaaagttatgaaccccaggtcctggaacaattacattatttcagatatgataagtatgcaaggagttgcagattcaaaaacaaagaggcttctttcatgtctgttaatgaaagctgctacaagtatgggcagaccttggatctaagtaaaaatagtatattttttgtcaagtcctctgattttcagcatctttctttcctcaaatgcctgaatctgtcaggaaatctcattagccaaactcttaatggcagtgaattccaacctttagcagagctgagatatttggacttctccaacaaccggcttgatttactccattcaacagcatttgaagagcttcacaaactggaagttctggatataagcagtaatagccattattttcaatcagaaggaattactcatatgctaaactttaccaagaacctaaaggttctgcagaaactgatgatgaacgacaatgacatctcttcctccaccagcaggaccatggagagtgagtctcttagaactctggaattcagaggaaatcacttagatgttttatggagagaaggtgataacagatacttacaattattcaagaatctgctaaaattagaggaattagacatctctaaaaattccctaagtttcttgccttctggagtttttgatggtatgcctccaaatctaaagaatctctctttggccaaaaatgggctcaaatctttcagttggaagaaactccagtgtctaaagaacctggaaactttggacctcagccacaaccaactgaccactgtccctgagagattatccaactgttccagaagcctcaagaatctgattcttaagaataatcaaatcaggagtctgacgaagtattttctacaagatgccttccagttgcgatatctggatctcagctcaaataaaatccagatgatccaaaagaccagcttcccagaaaatgtcctcaacaatctgaagatgttgcttttgcatcataatcggtttctgtgcacctgtgatgctgtgtggtttgtctggtgggttaaccatacggaggtgactattccttacctggccacagatgtgacttgtgtggggccaggagcacacaagggccaaagtgtgatctccctggatctgtacacctgtgagttagatctgactaacctgattctgttctcactttccatatctgtatctctctttctcatggtgatgatgacagcaagtcacctctatttctgggatgtgtggtatatttaccatttctgtaaggccaagataaaggggtatcagcgtctaatatcaccagactgttgctatgatgcttttattgtgtatgacactaaagacccagctgtgaccgagtgggttttggctgagctggtggccaaactggaagacccaagagagaaacattttaatttatgtctcgaggaaagggactggttaccagggcagccagttctggaaaacctttcccagagcatacagcttagcaaaaagacagtgtttgtgatgacagacaagtatgcaaagactgaaaattttaagatagcattttacttgtcccatcagaggctcatggatgaaaaagttgatgtgattatcttgatatttcttgagaagccctttcagaagtccaagttcctccagctccggaaaaggctctgtgggagttctgtccttgagtggccaacaaacccgcaagctcacccatacttctggcagtgtctaaagaacgccctggccacagacaatcatgtggcctatagtcaggtgttcaaggaaacggtc

SEQ ID NO: 118 - DNA, 3177 bp, Homo sapiens
  misc_feature 1..3177: note = TLR8, isoform 1
  source 1..3177: mol_type = genomic DNA
atgaaggagtcatctttgcaaaatagctcctgcagcctgggaaaggagactaaaaaggaaaacatgttccttcagtcgtcaatgctgacctgcattttcctgctaatatctggttcctgtgagttatgcgccgaagaaaatttttctagaagctatccttgtgatgagaaaaagcaaaatgactcagttattgcagagtgcagcaatcgtcgactacaggaagttccccaaacggtgggcaaatatgtgacagaactagacctgtctgataatttcatcacacacataacgaatgaatcatttcaagggctgcaaaatctcactaaaataaatctaaaccacaaccccaatgtacagcaccagaacggaaatcccggtatacaatcaaatggcttgaatatcacagacggggcattcctcaacctaaaaaacctaagggagttactgcttgaagacaaccagttaccccaaataccctctggtttgccagagtctttgacagaacttagtctaattcaaaacaatatatacaacataactaaagagggcatttcaagacttataaacttgaaaaatctctatttggcctggaactgctattttaacaaagtttgcgagaaaactaacatagaagatggagtatttgaaacgctgacaaatttggagttgctatcactatctttcaattctctttcacacgtgccacccaaactgccaagctccctacgcaaactttttctgagcaacacccagatcaaatacattagtgaagaagatttcaagggattgataaatttaacattactagatttaagcgggaactgtccgaggtgcttcaatgccccatttccatgcgtgccttgtgatggtggtgcttcaattaatatagatcgttttgcttttcaaaacttgacccaacttcgatacctaaacctctctagcacttccctcaggaagattaatgctgcctggtttaaaaatatgcctcatctgaaggtgctggatcttgaattcaactatttagtgggagaaatagcctctggggcatttttaacgatgctgccccgcttagaaatacttgacttgtcttttaactatataaaggggagttatccacagcatattaatatttccagaaacttctctaaacttttgtctctacgggcattgcatttaagaggttatgtgttccaggaactcagagaagatgatttccagcccctgatgcagcttccaaacttatcgactatcaacttgggtattaattttattaagcaaatcgatttcaaacttttccaaaatttctccaatctggaaattatttacttgtcagaaaacagaatatcaccgttggtaaaagatacccggcagagttatgcaaatagttcctcttttcaacgtcatatccggaaacgacgctcaacagattttgagtttgacccacattcgaacttttatcatttcacccgtcctttaataaagccacaatgtgctgcttatggaaaagccttagatttaagcctcaacagtattttcttcattgggccaaaccaatttgaaaatcttcctgacattgcctgtttaaatctgtctgcaaatagcaatgctcaagtgttaagtggaactgaattttcagccattcctcatgtcaaatatttggatttgacaaacaatagactagactttgataatgctagtgctcttactgaattgtccgacttggaagttctagatctcagctataattcacactatttcagaatagcaggcgtaacacatcatctagaatttattcaaaatttcacaaatctaaaagttttaaacttgagccacaacaacatttatactttaacagataagtataacctggaaagcaagtccctggtagaattagttttcagtggcaatcgccttgacattttgtggaatgatgatgacaacaggtatatctccattttcaaaggtctcaagaatctgacacgtctggatttatcccttaataggctgaagcacatcccaaatgaagcattccttaatttgccagcgagtctcactgaactacatataaatgataatatgttaaagttttttaactggacattactccagcagtttcctcgtctcgagttgcttgacttacgtggaaacaaactactctttttaactgatagcctatctgactttacatcttcccttcggacactgctgctgagtcataacaggatttcccacctaccctctggctttctttctgaagtcagtagtctgaagcacctcgatttaagttccaatctgctaaaaacaatcaacaaatccgcacttgaaactaagaccaccaccaaattatctatgttggaactacacggaaacccctttgaatgcacctgtgacattggagatttccgaagatggatggatgaacatctgaatgtcaaaattcccagactggtagatgtcatttgtgccagtcctggggatcaaagagggaagagtattgtgagtctggagctaacaacttgtgtttcagatgtcactgcagtgatattatttttcttcacgttctttatcaccaccatggttatgttggctgccctggctcaccatttgttttactgggatgtttggtttatatataatgtgtgtttagctaaggtaaaaggctacaggtctctttccacatcccaaactttctatgatgcttacatttcttatgacaccaaagatgcctctgttactgactgggtgataaatgagctgcgctaccaccttgaagagagccgagacaaaaacgttctcctttgtctagaggagagggattgggacccgggattggccatcatcgacaacctcatgcagagcatcaaccaaagcaagaaaacagtatttgttttaaccaaaaaatatgcaaaaagctggaactttaaaacagctttttacttggctttgcagaggctaatggatgagaacatggatgtgattatatttatcctgctggagccagtgttacagcattctcagtatttgaggctacggcagcggatctgtaagagctccatcctccagtggcctgacaacccgaaggcagaaggcttgttttggcaaactctgagaaatgtggtcttgactgaaaatgattcacggtataacaatatgtatgtcgattccattaagcaatac

SEQ ID NO: 119 - DNA, 636 bp, Homo sapiens
  misc_feature 1..636: note = Interleukin 6 (IL-6)
  source 1..636: mol_type = genomic DNA
atgaactccttctccacaagcgccttcggtccagttgccttctccctggggctgctcctggtgttgcctgctgccttccctgccccagtacccccaggagaagattccaaagatgtagccgccccacacagacagccactcacctcttcagaacgaattgacaaacaaattcggtacatcctcgacggcatctcagccctgagaaaggagacatgtaacaagagtaacatgtgtgaaagcagcaaagaggcactggcagaaaacaacctgaaccttccaaagatggctgaaaaagatggatgcttccaatctggattcaatgaggagacttgcctggtgaaaatcatcactggtcttttggagtttgaggtatacctagagtacctccagaacagatttgagagtagtgaggaacaagccagagctgtgcagatgagtacaaaagtcctgatccagttcctgcagaaaaaggcaaagaatctagatgcaataaccacccctgacccaaccacaaatgccagcctgctgacgaagctgcaggcacagaaccagtggctgcaggacatgacaactcatctcattctgcgcagctttaaggagttcctgcagtccagcctgagggctcttcggcaaatg

SEQ ID NO: 120 - DNA, 951 bp, Homo sapiens
  misc_feature 1..951: note = MyD88, isoform 1
  source 1..951: mol_type = genomic DNA
atgcgacccgaccgcgctgaggctccaggaccgcccgccatggctgcaggaggtcccggcgcggggtctgcggccccggtctcctccacatcctcccttcccctggctgctctcaacatgcgagtgcggcgccgcctgtctctgttcttgaacgtgcggacacaggtggcggccgactggaccgcgctggcggaggagatggactttgagtacttggagatccggcaactggagacacaagcggaccccactggcaggctgctggacgcctggcagggacgccctggcgcctctgtaggccgactgctcgagctgcttaccaagctgggccgcgacgacgtgctgctggagctgggacccagcattgaggaggattgccaaaagtatatcttgaagcagcagcaggaggaggctgagaagcctttacaggtggccgctgtagacagcagtgtcccacggacagcagagctggcgggcatcaccacacttgatgaccccctggggcatatgcctgagcgtttcgatgccttcatctgctattgccccagcgacatccagtttgtgcaggagatgatccggcaactggaacagacaaactatcgactgaagttgtgtgtgtctgaccgcgatgtcctgcctggcacctgtgtctggtctattgctagtgagctcatcgaaaagaggttggctagaaggccacggggtgggtgccgccggatggtggtggttgtctctgatgattacctgcagagcaaggaatgtgacttccagaccaaatttgcactcagcctctctccaggtgcccatcagaagcgactgatccccatcaagtacaaggcaatgaagaaagagttccccagcatcctgaggttcatcactgtctgcgactacaccaacccctgcaccaaatcttggttctggactcgccttgccaaggccttgtccctgccc

SEQ ID NO: 121 - DNA, 807 bp, Homo sapiens
  misc_feature 1..807: note = Interleukin 1-beta (IL-1beta)
  source 1..807: mol_type = genomic DNA
atggcagaagtacctgagctcgccagtgaaatgatggcttattacagtggcaatgaggatgacttgttctttgaagctgatggccctaaacagatgaagtgctccttccaggacctggacctctgccctctggatggcggcatccagctacgaatctccgaccaccactacagcaagggcttcaggcaggccgcgtcagttgttgtggccatggacaagctgaggaagatgctggttccctgcccacagaccttccaggagaatgacctgagcaccttctttcccttcatctttgaagaagaacctatcttcttcgacacatgggataacgaggcttatgtgcacgatgcacctgtacgatcactgaactgcacgctccgggactcacagcaaaaaagcttggtgatgtctggtccatatgaactgaaagctctccacctccagggacaggatatggagcaacaagtggtgttctccatgtcctttgtacaaggagaagaaagtaatgacaaaatacctgtggccttgggcctcaaggaaaagaatctgtacctgtcctgcgtgttgaaagatgataagcccactctacagctggagagtgtagatcccaaaaattacccaaagaagaagatggaaaagcgatttgtcttcaacaagatagaaatcaataacaagctggaatttgagtctgcccagttccccaactggtacatcagcacctctcaagcagaaaacatgcccgtcttcctgggagggaccaaaggcggccaggatataactgacttcaccatgcaatttgtgtcttcc

SEQ ID NO: 122 - DNA, 3075 bp, Homo sapiens
  misc_feature 1..3075: note = MDA5/IFIH1, isoform 1
  source 1..3075: mol_type = genomic DNA
atgtcgaatgggtattccacagacgagaatttccgctatctcatctcgtgcttcagggccagggtgaaaatgtacatccaggtggagcctgtgctggactacctgacctttctgcctgcagaggtgaaggagcagattcagaggacagtcgccacctccgggaacatgcaggcagttgaactgctgctgagcaccttggagaagggagtctggcaccttggttggactcgggaattcgtggaggccctccggagaaccggcagccctctggccgcccgctacatgaaccctgagctcacggacttgccctctccatcgtttgagaacgctcatgatgaatatctccaactgctgaacctccttcagcccactctggtggacaagcttctagttagagacgtcttggataagtgcatggaggaggaactgttgacaattgaagacagaaaccggattgctgctgcagaaaacaatggaaatgaatcaggtgtaagagagctactaaaaaggattgtgcagaaagaaaactggttctctgcatttctgaatgttcttcgtcaaacaggaaacaatgaacttgtccaagagttaacaggctctgattgctcagaaagcaatgcagagattgagaatttatcacaagttgatggtcctcaagtggaagagcaacttctttcaaccacagttcagccaaatctggagaaggaggtctggggcatggagaataactcatcagaatcatcttttgcagattcttctgtagtttcagaatcagacacaagtttggcagaaggaagtgtcagctgcttagatgaaagtcttggacataacagcaacatgggcagtgattcaggcaccatgggaagtgattcagatgaagagaatgtggcagcaagagcatccccggagccagaactccagctcaggccttaccaaatggaagttgcccagccagccttggaagggaagaatatcatcatctgcctccctacagggagtggaaaaaccagagtggctgtttacattgccaaggatcacttagacaagaagaaaaaagcatctgagcctggaaaagttatagttcttgtcaataaggtactgctagttgaacagctcttccgcaaggagttccaaccatttttgaagaaatggtatcgtgttattggattaagtggtgatacccaactgaaaatatcatttccagaagttgtcaagtcctgtgatattattatcagtacagctcaaatccttgaaaactccctcttaaacttggaaaatggagaagatgctggtgttcaattgtcagacttttccctcattatcattgatgaatgtcatcacaccaacaaagaagcagtgtataataacatcatgaggcattatttgatgcagaagttgaaaaacaatagactcaagaaagaaaacaaaccagtgattccccttcctcagatactgggactaacagcttcacctggtgttggaggggccacgaagcaagccaaagctgaagaacacattttaaaactatgtgccaatcttgatgcatttactattaaaactgttaaagaaaaccttgatcaactgaaaaaccaaatacaggagccatgcaagaagtttgccattgcagatgcaaccagagaagatccatttaaagagaaacttctagaaataatgacaaggattcaaacttattgtcaaatgagtccaatgtcagattttggaactcaaccctatgaacaatgggccattcaaatggaaaaaaaagctgcaaaagaaggaaatcgcaaagaacgtgtttgtgcagaacatttgaggaagtacaatgaggccctacaaattaatgacacaattcgaatgatagatgcgtatactcatcttgaaactttctataatgaagagaaagataagaagtttgcagtcatagaagatgatagtgatgagggtggtgatgatgagtattgtgatggtgatgaagatgaggatgatttaaagaaacctttgaaactggatgaaacagatagatttctcatgactttattttttgaaaacaataaaatgttgaaaaggctggctgaaaacccagaatatgaaaatgaaaagctgaccaaattaagaaataccataatggagcaatatactaggactgaggaatcagcacgaggaataatctttacaaaaacacgacagagtgcatatgcgctttcccagtggattactgaaaatgaaaaatttgctgaagtaggagtcaaagcccaccatctgattggagctggacacagcagtgagttcaaacccatgacacagaatgaacaaaaagaagtcattagtaaatttcgcactggaaaaataaatctgcttatcgctaccacagtggcagaagaaggtctggatattaaagaatgtaacattgttatccgttatggtctcgtcaccaatgaaatagccatggtccaggcccgtggtcgagccagagctgatgagagcacctacgtcctggttgctcacagtggttcaggagttatcgaacatgagacagttaatgatttccgagagaagatgatgtataaagctatacattgtgttcaaaatatgaaaccagaggagtatgctcataagattttggaattacagatgcaaagtataatggaaaagaaaatgaaaaccaagagaaatattgccaagcattacaagaataacccatcactaataactttcctttgcaaaaactgcagtgtgctagcctgttctggggaagatatccatgtaattgagaaaatgcatcacgtcaatatgaccccagaattcaaggaactttacattgtaagagaaaacaaagcactgcaaaagaagtgtgccgactatcaaataaatggtgaaatcatctgcaaatgtggccaggcttggggaacaatgatggtgcacaaaggcttagatttgccttgtctcaaaataaggaattttgtagtggttttcaaaaataattcaacaaagaaacaatacaaaaagtgggtagaattacctatcacatttcccaatcttgactattcagaatgctgtttatttagtgatgaggat

SEQ ID NO: 123 - DNA, 1620 bp, Homo sapiens
  misc_feature 1..1620: note = IPS-1/MAVS, isoform 1
  source 1..1620: mol_type = genomic DNA
atgccgtttgctgaagacaagacctataagtatatctgccgcaatttcagcaatttttgcaatgtggatgttgtagagattctgccttacctgccctgcctcacagcaagagaccaggatcgactgcgggccacctgcacactctcagggaaccgggacaccctctggcatctcttcaatacccttcagcggcggcccggctgggtggagtacttcattgcggcactgaggggctgtgagctagttgatctcgcggacgaagtggcctctgtctaccagagctaccagcctcggacctcggaccgtcccccagacccactggagccaccgtcacttcctgctgagaggccagggccccccacacctgctgcggcccacagcatcccctacaacagctgcagagagaaggagccaagttaccccatgcctgtccaggagacccaggcgccagagtccccaggagagaattcagagcaagccctgcagacgctcagccccagagccatcccaaggaatccagatggtggccccctggagtcctcctctgacctggcagccctcagccctctgacctccagcgggcatcaggagcaggacacagaactgggcagtacccacacagcaggtgcgacctccagcctcacaccatcccgtgggcctgtgtctccatctgtctccttccagcccctggcccgttccacccccagggcaagccgcttgcctggacccacagggtcagttgtatctactggcacctccttctcctcctcatcccctggcttggcctctgcaggggctgcagagggtaaacagggtgcagagagtgaccaggccgagcctatcatctgctccagtggggcagaggcacctgccaactctctgccctccaaagtgcctaccaccttgatgcctgtgaacacagtggccctgaaagtgcctgccaacccagcatctgtcagcacagtgccctccaagttgccaactagctcaaagccccctggtgcagtgccttctaatgcgctcaccaatccagcaccatccaaattgcccatcaactcaacccgtgctggcatggtgccatccaaagtgcctactagcatggtgctcaccaaggtgtctgccagcacagtccccactgacgggagcagcagaaatgaggagaccccagcagctccaacacccgccggcgccactggaggcagctcagcctggctagacagcagctctgagaataggggccttgggtcggagctgagtaagcctggcgtgctggcatcccaggtagacagcccgttctcgggctgcttcgaggatcttgccatcagtgccagcacctccttgggcatggggccctgccatggcccagaggagaatgagtataagtccgagggcacctttgggatccacgtggctgagaaccccagcatccagctcctggagggcaaccctgggccacctgcggacccggatggcggccccaggccacaagccgaccggaagttccaggagagggaggtgccatgccacaggccctcacctggggctctgtggctccaggtggctgtgacaggggtgctggtagtcacactcctggtggtgctgtaccggcggcgtctgcac

SEQ ID NO: 124 - DNA, 2775 bp, Homo sapiens
  misc_feature 1..2775: note = RIG-1/DDX58, isoform 1
  source 1..2775: mol_type = genomic DNA
atgaccaccgagcagcgacgcagcctgcaagccttccaggattatatccggaagaccctggaccctacctacatcctgagctacatggccccctggtttagggaggaagaggtgcagtatattcaggctgagaaaaacaacaagggcccaatggaggctgccacactttttctcaagttcctgttggagctccaggaggaaggctggttccgtggctttttggatgccctagaccatgcaggttattctggactttatgaagccattgaaagttgggatttcaaaaaaattgaaaagttggaggagtatagattacttttaaaacgtttacaaccagaatttaaaaccagaattatcccaaccgatatcatttctgatctgtctgaatgtttaattaatcaggaatgtgaagaaattctacagatttgctctactaaggggatgatggcaggtgcagagaaattggtggaatgccttctcagatcagacaaggaaaactggcccaaaactttgaaacttgctttggagaaagaaaggaacaagttcagtgaactgtggattgtagagaaaggtataaaagatgttgaaacagaagatcttgaggataagatggaaacttctgacatacagattttctaccaagaagatccagaatgccagaatcttagtgagaattcatgtccaccttcagaagtgtctgatacaaacttgtacagcccatttaaaccaagaaattaccaattagagcttgctttgcctgctatgaaaggaaaaaacacaataatatgtgctcctacaggttgtggaaaaacctttgtttcactgcttatatgtgaacatcatcttaaaaaattcccacaaggacaaaaggggaaagttgtcttttttgcgaatcagatcccagtgtatgaacagcagaaatctgtattctcaaaatactttgaaagacatgggtatagagttacaggcatttctggagcaacagctgagaatgtcccagtggaacagattgttgagaacaatgacatcatcattttaactccacagattcttgtgaacaaccttaaaaagggaacgattccatcactatccatctttactttgatgatatttgatgaatgccacaacactagtaaacaacacccgtacaatatgatcatgtttaattatctagatcagaaacttggaggatcttcaggcccactgccccaggtcattgggctgactgcctcggttggtgttggggatgccaaaaacacagatgaagccttggattatatctgcaagctgtgtgcttctcttgatgcgtcagtgatagcaacagtcaaacacaatctggaggaactggagcaagttgtttataagccccagaagtttttcaggaaagtggaatcacggattagcgacaaatttaaatacatcatagctcagctgatgagggacacagagagtctggcaaagagaatctgcaaagacctcgaaaacttatctcaaattcaaaatagggaatttggaacacagaaatatgaacaatggattgttacagttcagaaagcatgcatggtgttccagatgccagacaaagatgaagagagcaggatttgtaaagccctgtttttatacacttcacatttgcggaaatataatgatgccctcattatcagtgagcatgcacgaatgaaagatgctctggattacttgaaagacttcttcagcaatgtccgagcagcaggattcgatgagattgagcaagatcttactcagagatttgaagaaaagctgcaggaactagaaagtgtttccagggatcccagcaatgagaatcctaaacttgaagacctctgcttcatcttacaagaagagtaccacttaaacccagagacaataacaattctctttgtgaaaaccagagcacttgtggacgctttaaaaaattggattgaaggaaatcctaaactcagttttctaaaacctggcatattgactggacgtggcaaaacaaatcagaacacaggaatgaccctcccggcacagaagtgtatattggatgcattcaaagccagtggagatcacaatattctgattgccacctcagttgctgatgaaggcattgacattgcacagtgcaatcttgtcatcctttatgagtatgtgggcaatgtcatcaaaatgatccaaaccagaggcagaggaagagcaagaggtagcaagtgcttccttctgactagtaatgctggtgtaattgaaaaagaacaaataaacatgtacaaagaaaaaatgatgaatgactctattttacgccttcagacatgggacgaagcagtatttagggaaaagattctgcatatacagactcatgaaaaattcatcagagatagtcaagaaaaaccaaaacctgtacctgataaggaaaataaaaaactgctctgcagaaagtgcaaagccttggcatgttacacagctgacgtaagagtgatagaggaatgccattacactgtgcttggagatgcttttaaggaatgctttgtgagtagaccacatcccaagccaaagcagttttcaagttttgaaaaaagagcaaagatattctgtgcccgacagaactgcagccatgactggggaatccatgtgaagtacaagacatttgagattccagttataaaaattgaaagttttgtggtggaggatattgcaactggagttcagacactgtactcgaagtggaaggactttcattttgagaagataccatttgatccagcagaaatgtccaaa

SEQ ID NO: 125 - DNA, 1494 bp, Homo sapiens
  misc_feature 1..1494: note = IRF5, transcript variant 2
  source 1..1494: mol_type = genomic DNA
atgaaccagtccatcccagtggctcccaccccaccccgccgcgtgcggctgaagccctggctggtggcccaggtgaacagctgccagtacccagggcttcaatgggtcaacggggaaaagaaattattctgcatcccctggaggcatgccacaaggcatggtcccagccaggacggagataacaccatcttcaaggcctgggccaaggagacagggaaatacaccgaaggcgtggatgaagccgatccggccaagtggaaggccaacctgcgctgtgcccttaacaagagccgggacttccgcctcatctacgacgggccccgggacatgccacctcagccctacaagatctacgaggtctgctccaatggccctgctcccacagactcccagccccctgaggattactcttttggtgcaggagaggaggaggaagaagaggaagagctgcagaggatgttgccaagcctgagcctcacagaggatgtcaagtggccgcccactctgcagccgcccactctgcggccgcctactctgcagccgcccactctgcagccgcccgtggtgctgggtccccctgctccagaccccagccccctggctcctccccctggcaaccctgctggcttcagggagcttctctctgaggtcctggagcctgggcccctgcctgccagcctgccccctgcaggcgaacagctcctgccagacctgctgatcagcccccacatgctgcctctgaccgacctggagatcaagtttcagtaccgggggcggccaccccgggccctcaccatcagcaacccccatggctgccggctcttctacagccagctggaggccacccaggagcaggtggaactcttcggccccataagcctggagcaagtgcgcttccccagccctgaggacatccccagtgacaagcagcgcttctacacgaaccagctgctggatgtcctggaccgcgggctcatcctccagctacagggccaggacctttatgccatccgcctgtgtcagtgcaaggtgttctggagcgggccttgtgcctcagcccatgactcatgccccaaccccatccagcgggaggtcaagaccaagcttttcagcctggagcattttctcaatgagctcatcctgttccaaaagggccagaccaacaccccaccacccttcgagatcttcttctgctttggggaagaatggcctgaccgcaaaccccgagagaagaagctcattactgtacaggtggtgcctgtagcagctcgactgctgctggagatgttctcaggggagctatcttggtcagctgatagtatccggctacagatctcaaacccagacctcaaagaccgcatggtggagcaattcaaggagctccatcacatctggcagtcccagcagcggttgcagcctgtggcccaggcccctcctggagcaggccttggtgttggccaggggccctggcctatgcacccagctggcatgcaa

SEQ ID NO: 126 - DNA, 1284 bp, Homo sapiens
  misc_feature 1..1284: note = IRF3, isoform 1
  source 1..1284: mol_type = genomic DNA
accatgggaaccccaaagccacggatcctgccctggctggtgtcgcagctggacctggggcaactggagggcgtggcctgggtgaacaagagccgcacgcgcttccgcatcccttggaagcacggcctacggcaggatgcacagcaggaggatttcggaatcttccaggcctgggccgaggccactggtgcatatgttcccgggagggataagccagacctgccaacctggaagaggaatttccgctctgccctcaaccgcaaagaagggttgcgtttagcagaggaccggagcaaggaccctcacgacccacataaaatctacgagtttgtgaactcaggagttggggacttttcccagccagacacctctccggacaccaatggtggaggcagtacttctgatacccaggaagacattctggatgagttactgggtaacatggtgttggccccactcccagatccgggacccccaagcctggctgtagcccctgagccctgccctcagcccctgcggagccccagcttggacaatcccactcccttcccaaacctggggccctctgagaacccactgaagcggctgttggtgccgggggaagagtgggagttcgaggtgacagccttctaccggggccgccaagtcttccagcagaccatctcctgcccggagggcctgcggctggtggggtccgaagtgggagacaggacgctgcctggatggccagtcacactgccagaccctggcatgtccctgacagacaggggagtgatgagctacgtgaggcatgtgctgagctgcctgggtgggggactggctctctggcgggccgggcagtggctctgggcccagcggctggggcactgccacacatactgggcagtgagcgaggagctgctccccaacagcgggcatgggcctgatggcgaggtccccaaggacaaggaaggaggcgtgtttgacctggggcccttcattgtagatctgattaccttcacggaaggaagcggacgctcaccacgctatgccctctggttctgtgtgggggagtcatggccccaggaccagccgtggaccaagaggctcgtgatggtcaaggttgtgcccacgtgcctcagggccttggtagaaatggcccgggtagggggtgcctcctccctggagaatactgtggacctgcacatttccaacagccacccactctccctcacctccgaccagtacaaggcctacctgcaggacttggtggagggcatggatttccagggccctggggagagc

SEQ ID NO: 127 - DNA, 1275 bp, Homo sapiens
  misc_feature 1..1275: note = TANK
  source 1..1275: mol_type = genomic DNA
atggataaaaacattggcgagcaactcaataaagcgtatgaagccttccggcaggcatgcatggatagagattctgcagtaaaagaattacagcaaaagactgagaactatgagcagagaatacgtgaacaacaggaacagctgtcacttcaacagactattattgacaagctaaaatctcagttacttcttgtgaattccactcaagataacaattatggctgtgttcctctgcttgaagacagtgaaacaagaaagaataatttgactcttgatcagccacaagataaagtgatttcaggaatagcaagagaaaaactaccaaaggtaagaagacaagaggtttcttctcctagaaaagaaacttcagcaaggagtcttggcagtcctttgctccatgaaaggggtaatatagagaagactttctgggatctgaaagaagaatttcataaaatatgcatgctagcaaaagcacagaaagaccacttaagcaaacttaatataccagacactgcaactgaaacacagtgctctgtgcctatacagtgtacggataaaacagataaacaagaagcgctgtttaagcctcaggctaaagatgatataaatagaggtgcaccatccatcacatctgtcacaccaagaggactgtgcagagatgaggaagacacctcttttgaatcactttctaaattcaatgtcaagtttccacctatggacaatgactcaactttcttacatagcactccagagagacccggcatccttagtcctgccacgtctgaggcagtgtgccaagagaaatttaatatggagttcagagacaacccagggaactttgttaaaacagaagaaactttatttgaaattcagggaattgaccccatagcttcagctatacaaaaccttaaaacaactgacaaaacaaagccctcaaatctcgtaaacacttgtatcaggacaactctggatagagctgcgtgtttgccacctggagaccataatgcattatatgtaaatagcttcccacttctggacccatctgatgcaccttttccctcactcgattccccgggaaaagcaatccgaggaccacagcagcccatttggaagccctttcctaatcaagacagtgactcggtggtactaagtggcacagactcagaactgcatatacctcgagtatgtgaattctgtcaagcagttttcccaccatccattacatccaggggggatttccttcggcatcttaattcacacttcaatggagagact

SEQ ID NO: 128 - DNA, 2136 bp, Homo sapiens
  misc_feature 1..2136: note = TRIF/TICAM1
  source 1..2136: mol_type = genomic DNA
atggcctgcacaggcccatcacttcctagcgccttcgacattctaggtgcagcaggccaggacaagctcttgtatctgaagcacaaactgaagaccccacgcccaggctgccaggggcaggacctcctgcatgccatggttctcctgaagctgggccaggaaactgaggccaggatctctctagaggcattgaaggccgatgcggtggcccggctggtggcccgccagtgggctggcgtggacagcaccgaggacccagaggagcccccagatgtgtcctgggctgtggcccgcttgtaccacctgctggctgaggagaagctgtgccccgcctcgctgcgggacgtggcctaccaggaagccgtccgcaccctcagctccagggacgaccaccggctgggggaacttcaggatgaggcccgaaaccggtgtgggtgggacattgctggggatccagggagcatccggacgctccagtccaatctgggctgcctcccaccatcctcggctttgccctctgggaccaggagcctcccacgccccattgacggtgtttcggactggagccaagggtgctccctgcgatccactggcagccctgcctccctggccagcaacttggaaatcagccagtcccctaccatgcccttcctcagcctgcaccgcagcccacatgggcccagcaagctctgtgacgacccccaggccagcttggtgcccgagcctgtccccggtggctgccaggagcctgaggagatgagctggccgccatcgggggagattgccagcccaccagagctgccaagcagcccacctcctgggcttcccgaagtggccccagatgcaacctccactggcctccctgatacccccgcagctccagaaaccagcaccaactacccagtggagtgcaccgaggggtctgcaggcccccagtctctccccttgcctattctggagccggtcaaaaacccctgctctgtcaaagaccagacgccactccaactttctgtagaagataccacctctccaaataccaagccgtgcccacctactcccaccaccccagaaacatcccctcctcctcctcctcctcctccttcatctactccttgttcagctcacctgaccccctcctccctgttcccttcctccctggaatcatcatcggaacagaaattctataactttgtgatcctccacgccagggcagacgaacacatcgccctgcgggttcgggagaagctggaggcccttggcgtgcccgacggggccaccttctgcgaggatttccaggtgccggggcgcggggagctgagctgcctgcaggacgccatagaccactcagctttcatcatcctacttctcacctccaacttcgactgtcgcctgagcctgcaccaggtgaaccaagccatgatgagcaacctcacgcgacaggggtcgccagactgtgtcatccccttcctgcccctggagagctccccggcccagctcagctccgacacggccagcctgctctccgggctggtgcggctggacgaacactcccagatcttcgccaggaaggtggccaacaccttcaagccccacaggcttcaggcccgaaaggccatgtggaggaaggaacaggacacccgagccctgcgggaacagagccaacacctggacggtgagcggatgcaggcggcggcactgaacgcagcctactcagcctacctccagagctacttgtcctaccaggcacagatggagcagctccaggtggcttttgggagccacatgtcatttgggactggggcgccctatggggctcgaatgccctttgggggccaggtgcccctgggagccccgccaccctttcccacttggccggggtgcccgcagccgccacccctgcacgcatggcaggctggcacccccccaccgccctccccacagccagcagcctttccacagtcactgcccttcccgcagtccccagccttccctacggcctcacccgcaccccctcagagcccagggctgcaacccctcattatccaccacgcacagatggtacagctggggctgaacaaccacatgtggaaccagagagggtcccaggcgcccgaggacaagacgcaggaggcagaa

SEQ ID NO: 129 - DNA, 381 bp, Homo sapiens
  misc_feature 1..381: note = Batf3
  source 1..381: mol_type = genomic DNA
atgtcgcaagggctcccggccgccggcagcgtcctgcagaggagcgtcgcggcgcccgggaaccagccgcagccgcagccgcagcagcagagccctgaggatgatgacaggaaggtccgaaggagagaaaaaaaccgagttgctgctcagagaagtcggaagaagcagacccagaaggctgacaagctccatgaggaatatgagagcctggagcaagaaaacaccatgctgcggagagagatcgggaagctgacagaggagctgaagcacctgacagaggcactgaaggagcacgagaagatgtgcccgctgctgctctgccctatgaactttgtgccagtgcctccccggccggaccctgtggccggctgcttgccccga

SEQ ID NO: 130 - DNA, 459 bp, Homo sapiens
  misc_feature 1..459: note = IL-4, isoform 1
  source 1..459: mol_type = genomic DNA
atgggtctcacctcccaactgcttccccctctgttcttcctgctagcatgtgccggcaactttgtccacggacacaagtgcgatatcaccttacaggagatcatcaaaactttgaacagcctcacagagcagaagactctgtgcaccgagttgaccgtaacagacatctttgctgcctccaagaacacaactgagaaggaaaccttctgcagggctgcgactgtgctccggcagttctacagccaccatgagaaggacactcgctgcctgggtgcgactgcacagcagttccacaggcacaagcagctgatccgattcctgaaacggctcgacaggaacctctggggcctggcgggcttgaattcctgtcctgtgaaggaagccaaccagagtacgttggaaaacttcttggaaaggctaaagacgatcatgagagagaaatattcaaagtgttcgagc

SEQ ID NO: 131 - DNA, 534 bp, Homo sapiens
  misc_feature 1..534: note = IL-10
  source 1..534: mol_type = genomic DNA
atgcacagctcagcactgctctgttgcctggtcctcctgactggggtgagggccagcccaggccagggcacccagtctgagaacagctgcacccacttcccaggcaacctgcctaacatgcttcgagatctccgagatgccttcagcagagtgaagactttctttcaaatgaaggatcagctggacaacttgttgttaaaggagtccttgctggaggactttaagggttacctgggttgccaagccttgtctgagatgatccagttttacctggaggaggtgatgccccaagctgagaaccaagacccagacatcaaggcgcatgtgaactccctgggggagaacctgaagaccctcaggctgaggctacggcgctgtcatcgatttcttccctgtgaaaacaagagcaaggccgtggagcaggtgaagaatgcctttaataagctccaagagaaaggcatctacaaagccatgagtgagtttgacatcttcatcaactacatagaagcctacatgacaatgaagatacgaaac

SEQ ID NO: 132 - DNA, 759 bp, Homo sapiens
  misc_feature 1..759: note = IL-12 alpha
  source 1..759: mol_type = genomic DNA
atgtggccccctgggtcagcctcccagccaccgccctcacctgccgcggccacaggtctgcatccagcggctcgccctgtgtccctgcagtgccggctcagcatgtgtccagcgcgcagcctcctccttgtggctaccctggtcctcctggaccacctcagtttggccagaaacctccccgtggccactccagacccaggaatgttcccatgccttcaccactcccaaaacctgctgagggccgtcagcaacatgctccagaaggccagacaaactctagaattttacccttgcacttctgaagagattgatcatgaagatatcacaaaagataaaaccagcacagtggaggcctgtttaccattggaattaaccaagaatgagagttgcctaaattccagagagacctctttcataactaatgggagttgcctggcctccagaaagacctcttttatgatggccctgtgccttagtagtatttatgaagacttgaagatgtaccaggtggagttcaagaccatgaatgcaaagcttctgatggatcctaagaggcagatctttctagatcaaaacatgctggcagttattgatgagctgatgcaggccctgaatttcaacagtgagactgtgccacaaaaatcctcccttgaagaaccggatttttataaaactaaaatcaagctctgcatacttcttcatgctttcagaattcgggcagtgactattgatagagtgatgagctatctgaatgcttcc

SEQ ID NO: 133 - DNA, 986 bp, Homo sapiens
  misc_feature 1..986: note = IL-12 beta
  source 1..986: mol_type = genomic DNA
agatgtgtcaccagcagttggtcatctcttggttttccctggtttttctggcatctcccctcgtggccatatgggaactgaagaaagatgtttatgtcgtagaattggattggtatccggatgcccctggagaaatggtggtcctcacctgtgacacccctgaagaagatggtatcacctggaccttggaccagagcagtgaggtcttaggctctggcaaaaccctgaccatccaagtcaaagagtttggagatgctggccagtacacctgtcacaaaggaggcgaggttctaagccattcgctcctgctgcttcacaaaaaggaagatggaatttggtccactgatattttaaaggaccagaaagaacccaaaaataagacctttctaagatgcgaggccaagaattattctggacgtttcacctgctggtggctgacgacaatcagtactgatttgacattcagtgtcaaaagcagcagaggctcttctgacccccaaggggtgacgtgcggagctgctacactctctgcagagagagtcagaggggacaacaaggagtatgagtactcagtggagtgccaggaggacagtgcctgcccagctgctgaggagagtctgcccattgaggtcatggtggatgccgttcacaagctcaagtatgaaaactacaccagcagcttcttcatcagggacatcatcaaacctgacccacccaagaacttgcagctgaagccattaaagaattctcggcaggtggaggtcagctgggagtaccctgacacctggagtactccacattcctacttctccctgacattctgcgttcaggtccagggcaagagcaagagagaaaagaaagatagagtcttcacggacaagacctcagccacggtcatctgccgcaaaaatgccagcattagcgtgcgggcccaggaccgctactatagctcatcttggagcgaatgggcatctgtgccctgcagt

SEQ ID NO: 134 - DNA, 276 bp, Homo sapiens
  misc_feature 1..276: note = MIP-1 alpha/ CCL3
  source 1..276: mol_type = genomic DNA
atgcaggtctccactgctgcccttgctgtcctcctctgcaccatggctctctgcaaccagttctctgcatcacttgctgctgacacgccgaccgcctgctgcttcagctacacctcccggcagattccacagaatttcatagctgactactttgagacgagcagccagtgctccaagcccggtgtcatcttcctaaccaagcgaagccggcaggtctgtgctgaccccagtgaggagtgggtccagaaatatgtcagcgacctggagctgagtgcc

SEQ ID NO: 135 - DNA, 1530 bp, Homo sapiens
  misc_feature 1..1530: note = CD39/ENTPD1, isoform 1
  source 1..1530: mol_type = genomic DNA
atggaagatacaaaggagtctaacgtgaagacattttgctccaagaatatcctagccatccttggcttctcctctatcatagctgtgatagctttgcttgctgtggggttgacccagaacaaagcattgccagaaaacgttaagtatgggattgtgctggatgcgggttcttctcacacaagtttatacatctataagtggccagcagaaaaggagaatgacacaggcgtggtgcatcaagtagaagaatgcagggttaaaggtcctggaatctcaaaatttgttcagaaagtaaatgaaataggcatttacctgactgattgcatggaaagagctagggaagtgattccaaggtcccagcaccaagagacacccgtttacctgggagccacggcaggcatgcggttgctcaggatggaaagtgaagagttggcagacagggttctggatgtggtggagaggagcctcagcaactacccctttgacttccagggtgccaggatcattactggccaagaggaaggtgcctatggctggattactatcaactatctgctgggcaaattcagtcagaaaacaaggtggttcagcatagtcccatatgaaaccaataatcaggaaacctttggagctttggaccttgggggagcctctacacaagtcacttttgtaccccaaaaccagactatcgagtccccagataatgctctgcaatttcgcctctatggcaaggactacaatgtctacacacatagcttcttgtgctatgggaaggatcaggcactctggcagaaactggccaaggacattcaggttgcaagtaatgaaattctcagggacccatgctttcatcctggatataagaaggtagtgaacgtaagtgacctttacaagaccccctgcaccaagagatttgagatgactcttccattccagcagtttgaaatccagggtattggaaactatcaacaatgccatcaaagcatcctggagctcttcaacaccagttactgcccttactcccagtgtgccttcaatgggattttcttgccaccactccagggggattttggggcattttcagctttttactttgtgatgaagtttttaaacttgacatcagagaaagtctctcaggaaaaggtgactgagatgatgaaaaagttctgtgctcagccttgggaggagataaaaacatcttacgctggagtaaaggagaagtacctgagtgaatactgcttttctggtacctacattctctccctccttctgcaaggctatcatttcacagctgattcctgggagcacatccatttcattggcaagatccagggcagcgacgccggctggactttgggctacatgctgaacctgaccaacatgatcccagctgagcaaccattgtccacacctctctcccactccacctatgtcttcctcatggttctattctccctggtccttttcacagtggccatcataggcttgcttatctttcacaagccttcatatttctggaaagatatggta

SEQ ID NO: 136 - DNA, 1722 bp, Homo sapiens
  misc_feature 1..1722: note = CD73/NT5E, isoform 1
  source 1..1722: mol_type = genomic DNA
atgtgtccccgagccgcgcgggcgcccgcgacgctactcctcgccctgggcgcggtgctgtggcctgcggctggcgcctgggagcttacgattttgcacaccaacgacgtgcacagccggctggagcagaccagcgaggactccagcaagtgcgtcaacgccagccgctgcatgggtggcgtggctcggctcttcaccaaggttcagcagatccgccgcgccgaacccaacgtgctgctgctggacgccggcgaccagtaccagggcactatctggttcaccgtgtacaagggcgccgaggtggcgcacttcatgaacgccctgcgctacgatgccatggcactgggaaatcatgaatttgataatggtgtggaaggactgatcgagccactcctcaaagaggccaaatttccaattctgagtgcaaacattaaagcaaaggggccactagcatctcaaatatcaggactttatttgccatataaagttcttcctgttggtgatgaagttgtgggaatcgttggatacacttccaaagaaaccccttttctctcaaatccagggacaaatttagtgtttgaagatgaaatcactgcattacaacctgaagtagataagttaaaaactctaaatgtgaacaaaattattgcactgggacattcgggttttgaaatggataaactcatcgctcagaaagtgaggggtgtggacgtcgtggtgggaggacactccaacacatttctttacacaggcaatccaccttccaaagaggtgcctgctgggaagtacccattcatagtcacttctgatgatgggcggaaggttcctgtagtccaggcctatgcttttggcaaatacctaggctatctgaagatcgagtttgatgaaagaggaaacgtcatctcttcccatggaaatcccattcttctaaacagcagcattcctgaagatccaagcataaaagcagacattaacaaatggaggataaaattggataattattctacccaggaattagggaaaacaattgtctatctggatggctcctctcaatcatgccgctttagagaatgcaacatgggcaacctgatttgtgatgcaatgattaacaacaacctgagacacacggatgaaatgttctggaaccacgtatccatgtgcattttaaatggaggtggtatccggtcgcccattgatgaacgcaacaatggcacaattacctgggagaacctggctgctgtattgccctttggaggcacatttgacctagtccagttaaaaggttccaccctgaagaaggcctttgagcatagcgtgcaccgctacggccagtccactggagagttcctgcaggtgggcggaatccatgtggtgtatgatctttcccgaaaacctggagacagagtagtcaaattagatgttctttgcaccaagtgtcgagtgcccagttatgaccctctcaaaatggacgaggtatataaggtgatcctcccaaacttcctggccaatggtggagatgggttccagatgataaaagatgaattattaagacatgactctggtgaccaagatatcaacgtggtttctacatatatctccaaaatgaaagtaatttatccagcagttgaaggtcggatcaagttttccacaggaagtcactgccatggaagcttttctttaatatttctttcactttgggcagtgatctttgttttataccaa

SEQ ID NO: 137 - DNA, 297 bp, Homo sapiens
  misc_feature 1..297: note = IL-8 (CXCL8)
  source 1..297: mol_type = genomic DNA
atgacttccaagctggccgtggctctcttggcagccttcctgatttctgcagctctgtgtgaaggtgcagttttgccaaggagtgctaaagaacttagatgtcagtgcataaagacatactccaaacctttccaccccaaatttatcaaagaactgagagtgattgagagtggaccacactgcgccaacacagaaattattgtaaagctttctgatggaagagagctctgtctggaccccaaggaaaactgggtgcagagggttgtggagaagtttttgaagagggctgagaattca

SEQ ID NO: 138 - DNA, 1596 bp, Homo sapiens
  misc_feature 1..1596: note = ICAM1
  source 1..1596: mol_type = genomic DNA
atggctcccagcagcccccggcccgcgctgcccgcactcctggtcctgctcggggctctgttcccaggacctggcaatgcccagacatctgtgtccccctcaaaagtcatcctgccccggggaggctccgtgctggtgacatgcagcacctcctgtgaccagcccaagttgttgggcatagagaccccgttgcctaaaaaggagttgctcctgcctgggaacaaccggaaggtgtatgaactgagcaatgtgcaagaagatagccaaccaatgtgctattcaaactgccctgatgggcagtcaacagctaaaaccttcctcaccgtgtactggactccagaacgggtggaactggcacccctcccctcttggcagccagtgggcaagaaccttaccctacgctgccaggtggagggtggggcaccccgggccaacctcaccgtggtgctgctccgtggggagaaggagctgaaacgggagccagctgtgggggagcccgctgaggtcacgaccacggtgctggtgaggagagatcaccatggagccaatttctcgtgccgcactgaactggacctgcggccccaagggctggagctgtttgagaacacctcggccccctaccagctccagacctttgtcctgccagcgactcccccacaacttgtcagcccccgggtcctagaggtggacacgcaggggaccgtggtctgttccctggacgggctgttcccagtctcggaggcccaggtccacctggcactgggggaccagaggttgaaccccacagtcacctatggcaacgactccttctcggccaaggcctcagtcagtgtgaccgcagaggacgagggcacccagcggctgacgtgtgcagtaatactggggaaccagagccaggagacactgcagacagtgaccatctacagctttccggcgcccaacgtgattctgacgaagccagaggtctcagaagggaccgaggtgacagtgaagtgtgaggcccaccctagagccaaggtgacgctgaatggggttccagcccagccactgggcccgagggcccagctcctgctgaaggccaccccagaggacaacgggcgcagcttctcctgctctgcaaccctggaggtggccggccagcttatacacaagaaccagacccgggagcttcgtgtcctgtatggcccccgactggacgagagggattgtccgggaaactggacgtggccagaaaattcccagcagactccaatgtgccaggcttgggggaacccattgcccgagctcaagtgtctaaaggatggcactttcccactgcccatcggggaatcagtgactgtcactcgagatcttgagggcacctacctctgtcgggccaggagcactcaaggggaggtcacccgcaaggtgaccgtgaatgtgctctccccccggtatgagattgtcatcatcactgtggtagcagccgcagtcataatgggcactgcaggcctcagcacgtacctctataaccgccagcggaagatcaagaaatacagactacaacaggcccaaaaagggacccccatgaaaccgaacacacaagccacgcctccc

SEQ ID NO: 139 - DNA, 1488 bp, Homo sapiens
  misc_feature 1..1488: note = angiopoietin 2, isoform 1
  source 1..1488: mol_type = genomic DNA
atgtggcagattgttttctttactctgagctgtgatcttgtcttggccgcagcctataacaactttcggaagagcatggacagcataggaaagaagcaatatcaggtccagcatgggtcctgcagctacactttcctcctgccagagatggacaactgccgctcttcctccagcccctacgtgtccaatgctgtgcagagggacgcgccgctcgaatacgatgactcggtgcagaggctgcaagtgctggagaacatcatggaaaacaacactcagtggctaatgaagcttgagaattatatccaggacaacatgaagaaagaaatggtagagatacagcagaatgcagtacagaaccagacggctgtgatgatagaaatagggacaaacctgttgaaccaaacagcggagcaaacgcggaagttaactgatgtggaagcccaagtattaaatcagaccacgagacttgaacttcagctcttggaacactccctctcgacaaacaaattggaaaaacagattttggaccagaccagtgaaataaacaaattgcaagataagaacagtttcctagaaaagaaggtgctagctatggaagacaagcacatcatccaactacagtcaataaaagaagagaaagatcagctacaggtgttagtatccaagcaaaattccatcattgaagaactagaaaaaaaaatagtgactgccacggtgaataattcagttcttcagaagcagcaacatgatctcatggagacagttaataacttactgactatgatgtccacatcaaactcagctaaggaccccactgttgctaaagaagaacaaatcagcttcagagactgtgctgaagtattcaaatcaggacacaccacgaatggcatctacacgttaacattccctaattctacagaagagatcaaggcctactgtgacatggaagctggaggaggcgggtggacaattattcagcgacgtgaggatggcagcgttgattttcagaggacttggaaagaatataaagtgggatttggtaacccttcaggagaatattggctgggaaatgagtttgtttcgcaactgactaatcagcaacgctatgtgcttaaaatacaccttaaagactgggaagggaatgaggcttactcattgtatgaacatttctatctctcaagtgaagaactcaattataggattcaccttaaaggacttacagggacagccggcaaaataagcagcatcagccaaccaggaaatgattttagcacaaaggatggagacaacgacaaatgtatttgcaaatgttcacaaatgctaacaggaggctggtggtttgatgcatgtggtccttccaacttgaacggaatgtactatccacagaggcagaacacaaataagttcaacggcattaaatggtactactggaaaggctcaggctattcgctcaaggccacaaccatgatgatccgaccagcagatttc

SEQ ID NO: 140 - DNA, 2766 bp, Homo sapiens
  misc_feature 1..2766: note = NLRP3, isoform 2
  source 1..2766: mol_type = genomic DNA
atgaagatggcaagcacccgctgcaagctggccaggtacctggaggacctggaggatgtggacttgaagaaatttaagatgcacttagaggactatcctccccagaagggctgcatccccctcccgaggggtcagacagagaaggcagaccatgtggatctagccacgctaatgatcgacttcaatggggaggagaaggcgtgggccatggccgtgtggatcttcgctgcgatcaacaggagagacctttatgagaaagcaaaaagagatgagccgaagtggggttcagataatgcacgtgtttcgaatcccactgtgatatgccaggaagacagcattgaagaggagtggatgggtttactggagtacctttcgagaatctctatttgtaaaatgaagaaagattaccgtaagaagtacagaaagtacgtgagaagcagattccagtgcattgaagacaggaatgcccgtctgggtgagagtgtgagcctcaacaaacgctacacacgactgcgtctcatcaaggagcaccggagccagcaggagagggagcaggagcttctggccatcggcaagaccaagacgtgtgagagccccgtgagtcccattaagatggagttgctgtttgaccccgatgatgagcattctgagcctgtgcacaccgtggtgttccagggggcggcagggattgggaaaacaatcctggccaggaagatgatgttggactgggcgtcggggacactctaccaagacaggtttgactatctgttctatatccactgtcgggaggtgagccttgtgacacagaggagcctgggggacctgatcatgagctgctgccccgacccaaacccacccatccacaagatcgtgagaaaaccctccagaatcctcttcctcatggacggcttcgatgagctgcaaggtgcctttgacgagcacataggaccgctctgcactgactggcagaaggccgagcggggagacattctcctgagcagcctcatcagaaagaagctgcttcccgaggcctctctgctcatcaccacgagacctgtggccctggagaaactgcagcacttgctggaccatcctcggcatgtggagatcctgggtttctccgaggccaaaaggaaagagtacttcttcaagtacttctctgatgaggcccaagccagggcagccttcagtctgattcaggagaacgaggtcctcttcaccatgtgcttcatccccctggtctgctggatcgtgtgcactggactgaaacagcagatggagagtggcaagagccttgcccagacatccaagaccaccaccgcggtgtacgtcttcttcctttccagtttgctgcagccccggggagggagccaggagcacggcctctgcgcccacctctgggggctctgctctttggctgcagatggaatctggaaccagaaaatcctgtttgaggagtccgacctcaggaatcatggactgcagaaggcggatgtgtctgctttcctgaggatgaacctgttccaaaaggaagtggactgcgagaagttctacagcttcatccacatgactttccaggagttctttgccgccatgtactacctgctggaagaggaaaaggaaggaaggacgaacgttccagggagtcgtttgaagcttcccagccgagacgtgacagtccttctggaaaactatggcaaattcgaaaaggggtatttgatttttgttgtacgtttcctctttggcctggtaaaccaggagaggacctcctacttggagaagaaattaagttgcaagatctctcagcaaatcaggctggagctgctgaaatggattgaagtgaaagccaaagctaaaaagctgcagatccagcccagccagctggaattgttctactgtttgtacgagatgcaggaggaggacttcgtgcaaagggccatggactatttccccaagattgagatcaatctctccaccagaatggaccacatggtttcttccttttgcattgagaactgtcatcgggtggagtcactgtccctggggtttctccataacatgcccaaggaggaagaggaggaggaaaaggaaggccgacaccttgatatggtgcagtgtgtcctcccaagctcctctcatgctgcctgttctcatgggttggggcgctgtggcctctcgcatgagtgctgcttcgacatctccttggtcctcagcagcaaccagaagctggtggagctggacctgagtgacaacgccctcggtgacttcggaatcagacttctgtgtgtgggactgaagcacctgttgtgcaatctgaagaagctctggttggtgaattctggccttacgtcagtctgttgttcagctttgtcctcggtactcagcactaatcagaatctcacgcacctttacctgcgaggcaacactctcggagacaaggggatcaaactactctgtgagggactcttgcaccccgactgcaagcttcaggtgttggaattagacaactgcaacctcacgtcacactgctgctgggatctttccacacttctgacctccagccagagcctgcgaaagctgagcctgggcaacaatgacctgggcgacctgggggtcatgatgttctgtgaagtgctgaaacagcagagctgcctcctgcagaacctggggttgtctgaaatgtatttcaattatgagacaaaaagtgcgttagaaacacttcaagaagaaaagcctgagctgaccgtcgtctttgagccttcttgg

SEQ ID NO: 141 - DNA, 831 bp, Homo sapiens
  misc_feature 1..831: note = CD40, isoform 1
  source 1..831: mol_type = genomic DNA
atggttcgtctgcctctgcagtgcgtcctctggggctgcttgctgaccgctgtccatccagaaccacccactgcatgcagagaaaaacagtacctaataaacagtcagtgctgttctttgtgccagccaggacagaaactggtgagtgactgcacagagttcactgaaacggaatgccttccttgcggtgaaagcgaattcctagacacctggaacagagagacacactgccaccagcacaaatactgcgaccccaacctagggcttcgggtccagcagaagggcacctcagaaacagacaccatctgcacctgtgaagaaggctggcactgtacgagtgaggcctgtgagagctgtgtcctgcaccgctcatgctcgcccggctttggggtcaagcagattgctacaggggtttctgataccatctgcgagccctgcccagtcggcttcttctccaatgtgtcatctgctttcgaaaaatgtcacccttggacaagctgtgagaccaaagacctggttgtgcaacaggcaggcacaaacaagactgatgttgtctgtggtccccaggatcggctgagagccctggtggtgatccccatcatcttcgggatcctgtttgccatcctcttggtgctggtctttatcaaaaaggtggccaagaagccaaccaataaggccccccaccccaagcaggaaccccaggagatcaattttcccgacgatcttcctggctccaacactgctgctccagtgcaggagactttacatggatgccaaccggtcacccaggaggatggcaaagagagtcgcatctcagtgcaggagagacag

SEQ ID NO: 142 - DNA, 783 bp, Homo sapiens
  misc_feature 1..783: note = CD40 ligand (CD40L)
  source 1..783: mol_type = genomic DNA
atgatcgaaacatacaaccaaacttctccccgatctgcggccactggactgcccatcagcatgaaaatttttatgtatttacttactgtttttcttatcacccagatgattgggtcagcactttttgctgtgtatcttcatagaaggttggacaagatagaagatgaaaggaatcttcatgaagattttgtattcatgaaaacgatacagagatgcaacacaggagaaagatccttatccttactgaactgtgaggagattaaaagccagtttgaaggctttgtgaaggatataatgttaaacaaagaggagacgaagaaagaaaacagctttgaaatgcaaaaaggtgatcagaatcctcaaattgcggcacatgtcataagtgaggccagcagtaaaacaacatctgtgttacagtgggctgaaaaaggatactacaccatgagcaacaacttggtaaccctggaaaatgggaaacagctgaccgttaaaagacaaggactctattatatctatgcccaagtcaccttctgttccaatcgggaagcttcgagtcaagctccatttatagccagcctctgcctaaagtcccccggtagattcgagagaatcttactcagagctgcaaatacccacagttccgccaaaccttgcgggcaacaatccattcacttgggaggagtatttgaattgcaaccaggtgcttcggtgtttgtcaatgtgactgatccaagccaagtgagccatggcactggcttcacgtcctttggcttactcaaactc

SEQ ID NO: 143 - DNA, 579 bp, Homo sapiens
  misc_feature 1..579: note = CD-70 antigen, isoform 1
  source 1..579: mol_type = genomic DNA
atgccggaggagggttcgggctgctcggtgcggcgcaggccctatgggtgcgtcctgcgggctgctttggtcccattggtcgcgggcttggtgatctgcctcgtggtgtgcatccagcgcttcgcacaggctcagcagcagctgccgctcgagtcacttgggtgggacgtagctgagctgcagctgaatcacacaggacctcagcaggaccccaggctatactggcaggggggcccagcactgggccgctccttcctgcatggaccagagctggacaaggggcagctacgtatccatcgtgatggcatctacatggtacacatccaggtgacgctggccatctgctcctccacgacggcctccaggcaccaccccaccaccctggccgtgggaatctgctctcccgcctcccgtagcatcagcctgctgcgtctcagcttccaccaaggttgtaccattgcctcccagcgcctgacgcccctggcccgaggggacacactctgcaccaacctcactgggacacttttgccttcccgaaacactgatgagaccttctttggagtgcagtgggtgcgcccc

SEQ ID NO: 144 - DNA, 765 bp, Homo sapiens
  misc_feature 1..765: note = CD137 (4-1BB, TNFRSF9)
  source 1..765: mol_type = genomic DNA
atgggaaacagctgttacaacatagtagccactctgttgctggtcctcaactttgagaggacaagatcattgcaggatccttgtagtaactgcccagctggtacattctgtgataataacaggaatcagatttgcagtccctgtcctccaaatagtttctccagcgcaggtggacaaaggacctgtgacatatgcaggcagtgtaaaggtgttttcaggaccaggaaggagtgttcctccaccagcaatgcagagtgtgactgcactccagggtttcactgcctgggggcaggatgcagcatgtgtgaacaggattgtaaacaaggtcaagaactgacaaaaaaaggttgtaaagactgttgctttgggacatttaacgatcagaaacgtggcatctgtcgaccctggacaaactgttctttggatggaaagtctgtgcttgtgaatgggacgaaggagagggacgtggtctgtggaccatctccagccgacctctctccgggagcatcctctgtgaccccgcctgcccctgcgagagagccaggacactctccgcagatcatctccttctttcttgcgctgacgtcgactgcgttgctcttcctgctgttcttcctcacgctccgtttctctgttgttaaacggggcagaaagaaactcctgtatatattcaaacaaccatttatgagaccagtacaaactactcaagaggaagatggctgtagctgccgatttccagaagaagaagaaggaggatgtgaactg

SEQ ID NO: 145 - DNA, 807 bp, Homo sapiens
  misc_feature 1..807: note = CD200, isoform 1
  source 1..807: mol_type = genomic DNA
atggagaggctggtgatcaggatgcccttctctcatctgtctacctacagcctggtttgggtcatggcagcagtggtgctgtgcacagcacaagtgcaagtggtgacccaggatgaaagagagcagctgtacacacctgcttccttaaaatgctctctgcaaaatgcccaggaagccctcattgtgacatggcagaaaaagaaagctgtaagcccagaaaacatggtcaccttcagcgagaaccatggggtggtgatccagcctgcctataaggacaagataaacattacccagctgggactccaaaactcaaccatcaccttctggaatatcaccctggaggatgaagggtgttacatgtgtctcttcaatacctttggttttgggaagatctcaggaacggcctgcctcaccgtctatgtacagcccatagtatcccttcactacaaattctctgaagaccacctaaatatcacttgctctgccactgcccgcccagcccccatggtcttctggaaggtccctcggtcagggattgaaaatagtacagtgactctgtctcacccaaatgggaccacgtctgttaccagcatcctccatatcaaagaccctaagaatcaggtggggaaggaggtgatctgccaggtgctgcacctggggactgtgaccgactttaagcaaaccgtcaacaaaggctattggttttcagttccgctattgctaagcattgtttccctggtaattcttctcgtcctaatctcaatcttactgtactggaaacgtcaccggaatcaggaccgagagccc

SEQ ID NO: 146 - DNA, 1236 bp, Homo sapiens
  misc_feature 1..1236: note = A2aR (ADORA2A)
  source 1..1236: mol_type = genomic DNA
atgcccatcatgggctcctcggtgtacatcacggtggagctggccattgctgtgctggccatcctgggcaatgtgctggtgtgctgggccgtgtggctcaacagcaacctgcagaacgtcaccaactactttgtggtgtcactggcggcggccgacatcgcagtgggtgtgctcgccatcccctttgccatcaccatcagcaccgggttctgcgctgcctgccacggctgcctcttcattgcctgcttcgtcctggtcctcacgcagagctccatcttcagtctcctggccatcgccattgaccgctacattgccatccgcatcccgctccggtacaatggcttggtgaccggcacgagggctaagggcatcattgccatctgctgggtgctgtcgtttgccatcggcctgactcccatgctaggttggaacaactgcggtcagccaaaggagggcaagaaccactcccagggctgcggggagggccaagtggcctgtctctttgaggatgtggtccccatgaactacatggtgtacttcaacttctttgcctgtgtgctggtgcccctgctgctcatgctgggtgtctatttgcggatcttcctggcggcgcgacgacagctgaagcagatggagagccagcctctgccgggggagcgggcacggtccacactgcagaaggaggtccatgctgccaagtcactggccatcattgtggggctctttgccctctgctggctgcccctacacatcatcaactgcttcactttcttctgccccgactgcagccacgcccctctctggctcatgtacctggccatcgtcctctcccacaccaattcggttgtgaatcccttcatctacgcctaccgtatccgcgagttccgccagaccttccgcaagatcattcgcagccacgtcctgaggcagcaagaacctttcaaggcagctggcaccagtgcccgggtcttggcagctcatggcagtgacggagagcaggtcagcctccgtctcaacggccacccgccaggagtgtgggccaacggcagtgctccccaccctgagcggaggcccaatggctatgccctggggctggtgagtggagggagtgcccaagagtcccaggggaacacgggcctcccagacgtggagctccttagccatgagctcaagggagtgtgcccagagccccctggcctagatgaccccctggcccaggatggagcaggagtgtcc

SEQ ID NO: 147 - DNA, 723 bp, Homo sapiens
  misc_feature 1..723: note = GITR/TNFRSF18, isoform 1
  source 1..723: mol_type = genomic DNA
atggcacagcacggggcgatgggcgcgtttcgggccctgtgcggcctggcgctgctgtgcgcgctcagcctgggtcagcgccccaccgggggtcccgggtgcggccctgggcgcctcctgcttgggacgggaacggacgcgcgctgctgccgggttcacacgacgcgctgctgccgcgattacccgggcgaggagtgctgttccgagtgggactgcatgtgtgtccagcctgaattccactgcggagacccttgctgcacgacctgccggcaccacccttgtcccccaggccagggggtacagtcccaggggaaattcagttttggcttccagtgtatcgactgtgcctcggggaccttctccgggggccacgaaggccactgcaaaccttggacagactgcacccagttcgggtttctcactgtgttccctgggaacaagacccacaacgctgtgtgcgtcccagggtccccgccggcagagccgcttgggtggctgaccgtcgtcctcctggccgtggccgcctgcgtcctcctcctgacctcggcccagcttggactgcacatctggcagctgaggagtcagtgcatgtggccccgagagacccagctgctgctggaggtgccgccgtcgaccgaagacgccagaagctgccagttccccgaggaagagcggggcgagcgatcggcagaggagaaggggcggctgggagacctgtgggtg

SEQ ID NO: 148 - DNA, 1362 bp, Homo sapiens
  misc_feature 1..1362: note = B7-H6 (NCR3LG1)
  source 1..1362: mol_type = genomic DNA
atgacgtggagggctgccgcctccacgtgcgcggcgctcctgattctgctgtgggcgctgacgaccgaaggtgatctgaaagtagagatgatggcaggggggactcagatcacacccctgaatgacaatgtcaccatattctgcaatatcttttattcccaacccctcaacatcacgtctatgggtatcacctggttttggaagagtctgacgtttgacaaagaagtcaaagtctttgaattttttggagatcaccaagaggcattccgacctggagccattgtgtctccatggaggctgaagagtggggacgcctcactgcggctgcctggaatccagctggaggaagcaggagagtaccgatgtgaggtggtggtcacccctctgaaggcacagggaacagtccagcttgaagttgtggcttccccagccagcagattgttgctggatcaagtgggcatgaaagagaatgaagacaaatatatgtgtgagtcaagtgggttctacccagaggctattaatataacatgggagaagcagacccagaagtttccccatcccatagagatttctgaggatgtcatcactggtcccaccatcaagaatatggatggcacatttaatgtcactagctgcttgaagctgaactcctctcaggaagaccctgggactgtctaccagtgtgtggtacggcatgcgtccttgcatacccccttgaggagcaactttaccctgactgctgctcggcacagtctttctgaaactgagaagacagataatttttccattcattggtggcctatttcattcattggtgttggactggttttattaattgttttgattccttggaaaaagatatgtaacaaatcatcttcagcctatactcctctcaagtgcattctgaaacactggaactcctttgacactcagactctgaagaaagagcacctcatattcttttgcactcgggcatggccgtcttaccagctgcaggatggggaggcttggcctcctgagggaagtgttaatattaatactattcaacaactagatgttttctgcagacaggagggcaaatggtccgaggttccttatgtgcaagccttctttgccttgcgagacaacccagatctttgtcagtgttgtagaattgaccctgctctcctaacagttacatcaggcaagtccatagatgataattccacaaagtctgagaaacaaacccctagggaacactcggatgcagttccggatgccccaatccttcctgtctcccctatctgggaacctcctccagccacaacatcaacaactccagttctatcctcccaacccccaactttactgttacccctacag

SEQ ID NO: 149 - DNA, 597 bp, Homo sapiens
  misc_feature 1..597: note = ICOS, isoform 1
  source 1..597: mol_type = genomic DNA
atgaagtcaggcctctggtatttctttctcttctgcttgcgcattaaagttttaacaggagaaatcaatggttctgccaattatgagatgtttatatttcacaacggaggtgtacaaattttatgcaaatatcctgacattgtccagcaatttaaaatgcagttgctgaaaggggggcaaatactctgcgatctcactaagacaaaaggaagtggaaacacagtgtccattaagagtctgaaattctgccattctcagttatccaacaacagtgtctctttttttctatacaacttggaccattctcatgccaactattacttctgcaacctatcaatttttgatcctcctccttttaaagtaactcttacaggaggatatttgcatatttatgaatcacaactttgttgccagctgaagttctggttacccataggatgtgcagcctttgttgtagtctgcattttgggatgcatacttatttgttggcttacaaaaaagaagtattcatccagtgtgcacgaccctaacggtgaatacatgttcatgagagcagtgaacacagccaaaaaatctagactcacagatgtgacccta

SEQ ID NO: 150 - DNA, 906 bp, Homo sapiens
  misc_feature 1..906: note = ICOS ligand, isoform 1
  source 1..906: mol_type = genomic DNA
atgcggctgggcagtcctggactgctcttcctgctcttcagcagccttcgagctgatactcaggagaaggaagtcagagcgatggtaggcagcgacgtggagctcagctgcgcttgccctgaaggaagccgttttgatttaaatgatgtttacgtatattggcaaaccagtgagtcgaaaaccgtggtgacctaccacatcccacagaacagctccttggaaaacgtggacagccgctaccggaaccgagccctgatgtcaccggccggcatgctgcggggcgacttctccctgcgcttgttcaacgtcaccccccaggacgagcagaagtttcactgcctggtgttgagccaatccctgggattccaggaggttttgagcgttgaggttacactgcatgtggcagcaaacttcagcgtgcccgtcgtcagcgccccccacagcccctcccaggatgagctcaccttcacgtgtacatccataaacggctaccccaggcccaacgtgtactggatcaataagacggacaacagcctgctggaccaggctctgcagaatgacaccgtcttcttgaacatgcggggcttgtatgacgtggtcagcgtgctgaggatcgcacggacccccagcgtgaacattggctgctgcatagagaacgtgcttctgcagcagaacctgactgtcggcagccagacaggaaatgacatcggagagagagacaagatcacagagaatccagtcagtaccggcgagaaaaacgcggccacgtggagcatcctggctgtcctgtgcctgcttgtggtcgtggcggtggccataggctgggtgtgcagggaccgatgcctccaacacagctatgcaggtgcctgggctgtgagtccggagacagagctcactggccacgtt

SEQ ID NO: 151 - DNA, 1344 bp, Homo sapiens
  misc_feature 1..1344: note = gp49B/LILRB4, isoform 1
  source 1..1344: mol_type = genomic DNA
atgatccccaccttcacggctctgctctgcctcgggctgagtctgggccccaggacccacatgcaggcagggcccctccccaaacccaccctctgggctgagccaggctctgtgatcagctgggggaactctgtgaccatctggtgtcaggggaccctggaggctcgggagtaccgtctggataaagaggaaagcccagcaccctgggacagacagaacccactggagcccaagaacaaggccagattctccatcccatccatgacagaggactatgcagggagataccgctgttactatcgcagccctgtaggctggtcacagcccagtgaccccctggagctggtgatgacaggagcctacagtaaacccaccctttcagccctgccgagtcctcttgtgacctcaggaaagagcgtgaccctgctgtgtcagtcacggagcccaatggacacttttcttctgatcaaggagcgggcagcccatcccctactgcatctgagatcagagcacggagctcagcagcaccaggctgaattccccatgagtcctgtgacctcagtgcacggggggacctacaggtgcttcagctcacacggcttctcccactacctgctgtcacaccccagtgaccccctggagctcatagtctcaggatccttggagggtcccaggccctcacccacaaggtccgtctcaacagctgcaggccctgaggaccagcccctcatgcctacagggtcagtcccccacagtggtctgagaaggcactgggaggtactgatcggggtcttggtggtctccatcctgcttctctccctcctcctcttcctcctcctccaacactggcgtcagggaaaacacaggacattggcccagagacaggctgatttccaacgtcctccaggggctgccgagccagagcccaaggacgggggcctacagaggaggtccagcccagctgctgacgtccagggagaaaacttctgtgctgccgtgaagaacacacagcctgaggacggggtggaaatggacactcggcagagcccacacgatgaagacccccaggcagtgacgtatgccaaggtgaaacactccagacctaggagagaaatggcctctcctccctccccactgtctggggaattcctggacacaaaggacagacaggcagaagaggacagacagatggacactgaggctgctgcatctgaagccccccaggatgtgacctacgcccggctgcacagctttaccctcagacagaaggcaactgagcctcctccatcccaggaaggggcctctccagctgagcccagtgtctatgccactctggccatccac

SEQ ID NO: 152 - DNA, 1896 bp, Homo sapiens
  misc_feature 1..1896: note = PIR-B/LILRB3, isoform 1
  source 1..1896: mol_type = genomic DNA
atgacgcccgccctcacagccctgctctgccttgggctgagtctgggccccaggacccgcatgcaggcagggcccttccccaaacccaccctctgggctgagccaggctctgtgatcagctgggggagccccgtgaccatctggtgtcaggggagcctggaggcccaggagtaccaactggataaagagggaagcccagagccctgggacagaaataacccactggaacccaagaacaaggccagattctccatcccatccatgacacagcaccatgcagggagataccgctgccactattacagctctgcaggctggtcagagcccagcgaccccctggagctggtgatgacaggattctacaacaaacccaccctctcagccctgcccagccctgtggtggcctcaggggggaatatgaccctccgatgtggctcacagaagggatatcaccattttgttctgatgaaggaaggagaacaccagctcccccggaccctggactcacagcagctccacagtggggggttccaggccctgttccctgtgggccccgtgacccccagccacaggtggaggttcacatgctattactattatacaaacaccccctgggtgtggtcccaccccagtgaccccctggagattctgccctcaggcgtgtctaggaagccctccctcctgaccctgcagggccctgtcctggcccctgggcagagcctgaccctccagtgtggctctgatgtcggctacgacagatttgttctgtataaggagggggaacgtgacttcctccagcgccctggccagcagccccaggctgggctctcccaggccaacttcaccctgggccctgtgagccgctcctacgggggccagtacaggtgctatggtgcacacaacctctcctccgagtggtcggcccccagtgaccccctggacatcctgatcacaggacagatctatgacaccgtctccctgtcagcacagccgggccccacagtggcctcaggagagaacatgaccctgctgtgtcagtcacgggggtattttgacactttccttctgaccaaagaaggggcagcccatcccccactgcgtctgagatcaatgtacggagctcataagtaccaggctgaattccccatgagtcctgtgacctcagcccacgcggggacctacaggtgctacggctcacgcagctccaacccccacctgctgtctttccccagtgagcccctggaactcatggtctcaggacactctggaggctccagcctcccacccacagggccgccctccacacctggtctgggaagatacctggaggttttgattggggtctcggtggccttcgtcctgctgctcttcctcctcctcttcctcctcctcctccgtcagcgtcacagcaaacacaggacatctgaccagagaaagactgatttccagcgtcctgcaggggctgcggagacagagcccaaggacaggggcctgctgaggaggtccagcccagctgctgacgtccaggaagaaaacctctatgctgctgtgaaggacacacagtctgaggacagggtggagctggacagtcagcagagcccacacgatgaagacccccaggcagtgacgtatgccccggtgaaacactccagtcctaggagagaaatggcctctcctccctcctcactgtctggggaattcctggacacaaaggacagacaggtggaagaggacaggcagatggacactgaggctgctgcatctgaagcctcccaggatgtgacctacgcccagctgcacagcttgacccttagacggaaggcaactgagcctcctccatcccaggaaggggaacctccagctgagcccagcatctacgccactctggccatccac

SEQ ID NO: 153 - DNA, 1014 bp, Homo sapiens
  misc_feature 1..1014: note = HLA-G alpha chain
  source 1..1014: mol_type = genomic DNA
atggtggtcatggcgccccgaaccctcttcctgctgctctcgggggccctgaccctgaccgagacctgggcgggctcccactccatgaggtatttcagcgccgccgtgtcccggcccggccgcggggagccccgcttcatcgccatgggctacgtggacgacacgcagttcgtgcggttcgacagcgactcggcgtgtccgaggatggagccgcgggcgccgtgggtggagcaggaggggccggagtattgggaagaggagacacggaacaccaaggcccacgcacagactgacagaatgaacctgcagaccctgcgcggctactacaaccagagcgaggccagttctcacaccctccagtggatgattggctgcgacctggggtccgacggacgcctcctccgcgggtatgaacagtatgcctacgatggcaaggattacctcgccctgaacgaggacctgcgctcctggaccgcagcggacactgcggctcagatctccaagcgcaagtgtgaggcggccaatgtggctgaacaaaggagagcctacctggagggcacgtgcgtggagtggctccacagatacctggagaacgggaaggagatgctgcagcgcgcggacccccccaagacacacgtgacccaccaccctgtctttgactatgaggccaccctgaggtgctgggccctgggcttctaccctgcggagatcatactgacctggcagcgggatggggaggaccagacccaggacgtggagctcgtggagaccaggcctgcaggggatggaaccttccagaagtgggcagctgtggtggtgccttctggagaggagcagagatacacgtgccatgtgcagcatgaggggctgccggagcccctcatgctgagatggaagcagtcttccctgcccaccatccccatcatgggtatcgttgctggcctggttgtccttgcagctgtagtcactggagctgcggtcgctgctgtgctgtggagaaagaagagctcagat

SEQ ID NO: 154 - DNA, 1092 bp, Homo sapiens
  misc_feature 1..1092: note = TIM1/HAVCR1
  source 1..1092: mol_type = genomic DNA
atgcatcctcaagtggtcatcttaagcctcatcctacatctggcagattctgtagctggttctgtaaaggttggtggagaggcaggtccatctgtcacactaccctgccactacagtggagctgtcacatccatgtgctggaatagaggctcatgttctctattcacatgccaaaatggcattgtctggaccaatggaacccacgtcacctatcggaaggacacacgctataagctattgggggacctttcaagaagggatgtctctttgaccatagaaaatacagctgtgtctgacagtggcgtatattgttgccgtgttgagcaccgtgggtggttcaatgacatgaaaatcaccgtatcattggagattgtgccacccaaggtcacgactactccaattgtcacaactgttccaaccgtcacgactgttcgaacgagcaccactgttccaacgacaacgactgttccaatgacgactgttccaacgacaactgttccaacaacaatgagcattccaacgacaacgactgttctgacgacaatgactgtttcaacgacaacgagcgttccaacgacaacgagcattccaacaacaacaagtgttccagtgacaacaactgtctctacctttgttcctccaatgcctttgcccaggcagaaccatgaaccagtagccacttcaccatcttcacctcagccagcagaaacccaccctacgacactgcagggagcaataaggagagaacccaccagctcaccattgtactcttacacaacagatgggaatgacaccgtgacagagtcttcagatggcctttggaataacaatcaaactcaactgttcctagaacatagtctactgacggccaataccactaaaggaatctatgctggagtctgtatttctgtcttggtgcttcttgctcttttgggtgtcatcattgccaaaaagtatttcttcaaaaaggaggttcaacaactaagtgtttcatttagcagccttcaaattaaagctttgcaaaatgcagttgaaaaggaagtccaagcagaagacaatatctacattgagaatagtctttatgccacggac

SEQ ID NO: 155 - DNA, 1134 bp, Homo sapiens
  misc_feature 1..1134: note = TIM4/TIMD4, isoform 1
  source 1..1134: mol_type = genomic DNA
atgtccaaagaacctctcattctctggctgatgattgagttttggtggctttacctgacaccagtcacttcagagactgttgtgacggaggttttgggtcaccgggtgactttgccctgtctgtactcatcctggtctcacaacagcaacagcatgtgctgggggaaagaccagtgcccctactccggttgcaaggaggcgctcatccgcactgatggaatgagggtgacctcaagaaagtcagcaaaatatagacttcaggggactatcccgagaggtgatgtctccttgaccatcttaaaccccagtgaaagtgacagcggtgtgtactgctgccgcatagaagtgcctggctggttcaacgatgtaaagataaacgtgcgcctgaatctacagagagcctcaacaaccacgcacagaacagcaaccaccaccacacgcagaacaacaacaacaagccccaccaccacccgacaaatgacaacaaccccagctgcacttccaacaacagtcgtgaccacacccgatctcacaaccggaacaccactccagatgacaaccattgccgtcttcacaacagcaaacacgtgcctttcactaaccccaagcacccttccggaggaagccacaggtcttctgactcccgagccttctaaggaagggcccatcctcactgcagaatcagaaactgtcctccccagtgattcctggagtagtgttgagtctacttctgctgacactgtcctgctgacatccaaagagtccaaagtttgggatctcccatcaacatcccacgtgtcaatgtggaaaacgagtgattctgtgtcttctcctcagcctggagcatctgatacagcagttcctgagcagaacaaaacaacaaaaacaggacagatggatggaatacccatgtcaatgaagaatgaaatgcccatctcccaactactgatgatcatcgccccctccttgggatttgtgctcttcgcattgtttgtggcgtttctcctgagagggaaactcatggaaacctattgttcgcagaaacacacaaggctagactacattggagatagtaaaaatgtcctcaatgacgtgcagcatggaagggaagacgaagacggcctttttaccctc

SEQ ID NO: 156 - DNA, 831 bp, Homo sapiens
  misc_feature 1..831: note = OX-40/CD134/TNFRSF4
  source 1..831: mol_type = genomic DNA
atgtgcgtgggggctcggcggctgggccgcgggccgtgtgcggctctgctcctcctgggcctggggctgagcaccgtgacggggctccactgtgtcggggacacctaccccagcaacgaccggtgctgccacgagtgcaggccaggcaacgggatggtgagccgctgcagccgctcccagaacacggtgtgccgtccgtgcgggccgggcttctacaacgacgtggtcagctccaagccgtgcaagccctgcacgtggtgtaacctcagaagtgggagtgagcggaagcagctgtgcacggccacacaggacacagtctgccgctgccgggcgggcacccagcccctggacagctacaagcctggagttgactgtgccccctgccctccagggcacttctccccaggcgacaaccaggcctgcaagccctggaccaactgcaccttggctgggaagcacaccctgcagccggccagcaatagctcggacgcaatctgtgaggacagggaccccccagccacgcagccccaggagacccagggccccccggccaggcccatcactgtccagcccactgaagcctggcccagaacctcacagggaccctccacccggcccgtggaggtccccgggggccgtgcggttgccgccatcctgggcctgggcctggtgctggggctgctgggccccctggccatcctgctggccctgtacctgctccggagggaccagaggctgccccccgatgcccacaagccccctgggggaggcagtttccggacccccatccaagaggagcaggccgacgcccactccaccctggccaagatc

SEQ ID NO: 157 - DNA, 549 bp, Homo sapiens
  misc_feature 1..549: note = OX-40L/CD252/TNFSF4, isoform 1
  source 1..549: mol_type = genomic DNA
atggaaagggtccaacccctggaagagaatgtgggaaatgcagccaggccaagattcgagaggaacaagctattgctggtggcctctgtaattcagggactggggctgctcctgtgcttcacctacatctgcctgcacttctctgctcttcaggtatcacatcggtatcctcgaattcaaagtatcaaagtacaatttaccgaatataagaaggagaaaggtttcatcctcacttcccaaaaggaggatgaaatcatgaaggtgcagaacaactcagtcatcatcaactgtgatgggttttatctcatctccctgaagggctacttctcccaggaagtcaacattagccttcattaccagaaggatgaggagcccctcttccaactgaagaaggtcaggtctgtcaactccttgatggtggcctctctgacttacaaagacaaagtctacttgaatgtgaccactgacaatacctccctggatgacttccatgtgaatggcggagaactgattcttatccatcaaaatcctggtgaattctgtgtcctt

SEQ ID NO: 158 - DNA, 1950 bp, Homo sapiens
  misc_feature 1..1950: note = ILT-2/LILRB1, isoform 1
  source 1..1950: mol_type = genomic DNA
atgacccccatcctcacggtcctgatctgtctcgggctgagtctgggcccccggacccacgtgcaggcagggcacctccccaagcccaccctctgggctgaaccaggctctgtgatcacccaggggagtcctgtgaccctcaggtgtcaggggggccaggagacccaggagtaccgtctatatagagaaaagaaaacagcaccctggattacacggatcccacaggagcttgtgaagaagggccagttccccatcccatccatcacctgggaacacacagggcggtatcgctgttactatggtagcgacactgcaggccgctcagagagcagtgaccccctggagctggtggtgacaggagcctacatcaaacccaccctctcagcccagcccagccccgtggtgaactcaggagggaatgtaaccctccagtgtgactcacaggtggcatttgatggcttcattctgtgtaaggaaggagaagatgaacacccacaatgcctgaactcccagccccatgcccgtgggtcgtcccgcgccatcttctccgtgggccccgtgagcccgagtcgcaggtggtggtacaggtgctatgcttatgactcgaactctccctatgagtggtctctacccagtgatctcctggagctcctggtcctaggtgtttctaagaagccatcactctcagtgcagccaggtcctatcgtggcccctgaggagaccctgactctgcagtgtggctctgatgctggctacaacagatttgttctgtataaggacggggaacgtgacttccttcagctcgctggcgcacagccccaggctgggctctcccaggccaacttcaccctgggccctgtgagccgctcctacgggggccagtacagatgctacggtgcacacaacctctcctccgagtggtcggcccccagcgaccccctggacatcctgatcgcaggacagttctatgacagagtctccctctcggtgcagccgggccccacggtggcctcaggagagaacgtgaccctgctgtgtcagtcacagggatggatgcaaactttccttctgaccaaggagggggcagctgatgacccatggcgtctaagatcaacgtaccaatctcaaaaataccaggctgaattccccatgggtcctgtgacctcagcccatgcggggacctacaggtgctacggctcacagagctccaaaccctacctgctgactcaccccagtgaccccctggagctcgtggtctcaggaccgtctgggggccccagctccccgacaacaggccccacctccacatctggccctgaggaccagcccctcacccccaccgggtcggatccccagagtggtctgggaaggcacctgggggttgtgatcggcatcttggtggccgtcatcctactgctcctcctcctcctcctcctcttcctcatcctccgacatcgacgtcagggcaaacactggacatcgacccagagaaaggctgatttccaacatcctgcaggggctgtggggccagagcccacagacagaggcctgcagtggaggtccagcccagctgccgatgcccaggaagaaaacctctatgctgccgtgaagcacacacagcctgaggatggggtggagatggacactcggagcccacacgatgaagacccccaggcagtgacgtatgccgaggtgaaacactccagacctaggagagaaatggcctctcctccttccccactgtctggggaattcctggacacaaaggacagacaggcggaagaggacaggcagatggacactgaggctgctgcatctgaagccccccaggatgtgacctacgcccagctgcacagcttgaccctcagacgggaggcaactgagcctcctccatcccaggaagggccctctccagctgtgcccagcatctacgccactctggccatccac

SEQ ID NO: 159 - DNA, 1794 bp, Homo sapiens
  misc_feature 1..1794: note = ILT-4/LILRB2, isoform 1
  source 1..1794: mol_type = genomic DNA
atgacccccatcgtcacagtcctgatctgtctcgggctgagtctgggccccaggacccgcgtgcagacagggaccatccccaagcccaccctgtgggctgagccagactctgtgatcacccaggggagtcccgtcaccctcagttgtcaggggagccttgaagcccaggagtaccgtctatatagggagaaaaaatcagcatcttggattacacggatacgaccagagcttgtgaagaacggccagttccacatcccatccatcacctgggaacacacagggcgatatggctgtcagtattacagccgcgctcggtggtctgagctcagtgaccccctggtgctggtgatgacaggagcctacccaaaacccaccctctcagcccagcccagccctgtggtgacctcaggaggaagggtgaccctccagtgtgagtcacaggtggcatttggcggcttcattctgtgtaaggaaggagaagatgaacacccacaatgcctgaactcccagccccatgcccgtgggtcgtcccgcgccatcttctccgtgggccccgtgagcccgaatcgcaggtggtcgcacaggtgctatggttatgacttgaactctccctatgtgtggtcttcacccagtgatctcctggagctcctggtcccaggtgtttctaagaagccatcactctcagtgcagccgggtcctgtcatggcccctggggaaagcctgaccctccagtgtgtctctgatgtcggctatgacagatttgttctgtacaaggagggggaacgtgaccttcgccagctccctggccggcagccccaggctgggctctcccaggccaacttcaccctgggccctgtgagccgctcctacgggggccagtacagatgctacggtgcacacaacctctcctctgagtgctcggcccccagcgaccccctggacatcctgatcacaggacagatccgtggcacacccttcatctcagtgcagccaggccccacagtggcctcaggagagaacgtgaccctgctgtgtcagtcatggcggcagttccacactttccttctgaccaaggcgggagcagctgatgccccactccgtctaagatcaatacacgaatatcctaagtaccaggctgaattccccatgagtcctgtgacctcagcccacgcggggacctacaggtgctacggctcactcaactccgacccctacctgctgtctcaccccagtgagcccctggagctcgtggtctcaggaccctccatgggttccagccccccacccaccggtcccatctccacacctgcaggccctgaggaccagcccctcacccccactgggtcggatccccaaagtggtctgggaaggcacctgggggttgtgatcggcatcttggtggccgtcgtcctactgctcctcctcctcctcctcctcttcctcatcctccgacatcgacgtcagggcaaacactggacatcgacccagagaaaggctgatttccaacatcctgcaggggctgtggggccagagcccacagacagaggcctgcagtggaggtccagcccagctgccgacgcccaggaagaaaacctctatgctgccgtgaaggacacacagcctgaagatggggtggagatggacactcgggctgctgcatctgaagccccccaggatgtgacctacgcccagctgcacagcttgaccctcagacggaaggcaactgagcctcctccatcccaggaaagggaacctccagctgagcccagcatctacgccaccctggccatccac

SEQ ID NO: 160 - DNA, 717 bp, Homo sapiens
  misc_feature 1..717: note = BCL-2 isoform alpha
  source 1..717: mol_type = genomic DNA
atggcgcacgctgggagaacagggtacgataaccgggagatagtgatgaagtacatccattataagctgtcgcagaggggctacgagtgggatgcgggagatgtgggcgccgcgcccccgggggccgcccccgcaccgggcatcttctcctcccagcccgggcacacgccccatccagccgcatcccgggacccggtcgccaggacctcgccgctgcagaccccggctgcccccggcgccgccgcggggcctgcgctcagcccggtgccacctgtggtccacctgaccctccgccaggccggcgacgacttctcccgccgctaccgccgcgacttcgccgagatgtccagccagctgcacctgacgcccttcaccgcgcggggacgctttgccacggtggtggaggagctcttcagggacggggtgaactgggggaggattgtggccttctttgagttcggtggggtcatgtgtgtggagagcgtcaaccgggagatgtcgcccctggtggacaacatcgccctgtggatgactgagtacctgaaccggcacctgcacacctggatccaggataacggaggctgggatgcctttgtggaactgtacggccccagcatgcggcctctgtttgatttctcctggctgtctctgaagactctgctcagtttggccctggtgggagcttgcatcaccctgggtgcctatctgggccacaag

SEQ ID NO: 161 - DNA, 4050 bp, Homo sapiens
  misc_feature 1..4050: note = MDR1/ABCB1, isoform 1
  source 1..4050: mol_type = genomic DNA
atgagtgtcaacttgcaaggggaccagagaggtgcaacggaagccagaacattcctcctggaaattcaacctgtttcgcagtttctcgaggaatcagcattcagtcaatccgggccgggagcagtcatctgtggtctttccactaaagtcggagtatcttcttccaaaatttcacgtcttggtggccgttccaaggagcgcgaggtcggaatggatcttgaaggggaccgcaatggaggagcaaagaagaagaacttttttaaactgaacaataaaagtgaaaaagataagaaggaaaagaaaccaactgtcagtgtattttcaatgtttcgctattcaaattggcttgacaagttgtatatggtggtgggaactttggctgccatcatccatggggctggacttcctctcatgatgctggtgtttggagaaatgacagatatctttgcaaatgcaggaaatttagaagatctgatgtcaaacatcactaatagaagtgatatcaatgatacagggttcttcatgaatctggaggaagacatgaccaggtatgcctattattacagtggaattggtgctggggtgctggttgctgcttacattcaggtttcattttggtgcctggcagctggaagacaaatacacaaaattagaaaacagttttttcatgctataatgcgacaggagataggctggtttgatgtgcacgatgttggggagcttaacacccgacttacagatgatgtctccaagattaatgaaggaattggtgacaaaattggaatgttctttcagtcaatggcaacatttttcactgggtttatagtaggatttacacgtggttggaagctaacccttgtgattttggccatcagtcctgttcttggactgtcagctgctgtctgggcaaagatactatcttcatttactgataaagaactcttagcgtatgcaaaagctggagcagtagctgaagaggtcttggcagcaattagaactgtgattgcatttggaggacaaaagaaagaacttgaaaggtacaacaaaaatttagaagaagctaaaagaattgggataaagaaagctattacagccaatatttctataggtgctgctttcctgctgatctatgcatcttatgctctggccttctggtatgggaccaccttggtcctctcaggggaatattctattggacaagtactcactgtattcttttctgtattaattggggcttttagtgttggacaggcatctccaagcattgaagcatttgcaaatgcaagaggagcagcttatgaaatcttcaagataattgataataagccaagtattgacagctattcgaagagtgggcacaaaccagataatattaagggaaatttggaattcagaaatgttcacttcagttacccatctcgaaaagaagttaagatcttgaagggtctgaacctgaaggtgcagagtgggcagacggtggccctggttggaaacagtggctgtgggaagagcacaacagtccagctgatgcagaggctctatgaccccacagaggggatggtcagtgttgatggacaggatattaggaccataaatgtaaggtttctacgggaaatcattggtgtggtgagtcaggaacctgtattgtttgccaccacgatagctgaaaacattcgctatggccgtgaaaatgtcaccatggatgagattgagaaagctgtcaaggaagccaatgcctatgactttatcatgaaactgcctcataaatttgacaccctggttggagagagaggggcccagttgagtggtgggcagaagcagaggatcgccattgcacgtgccctggttcgcaaccccaagatcctcctgctggatgaggccacgtcagccttggacacagaaagcgaagcagtggttcaggtggctctggataaggccagaaaaggtcggaccaccattgtgatagctcatcgtttgtctacagttcgtaatgctgacgtcatcgctggtttcgatgatggagtcattgtggagaaaggaaatcatgatgaactcatgaaagagaaaggcatttacttcaaacttgtcacaatgcagacagcaggaaatgaagttgaattagaaaatgcagctgatgaatccaaaagtgaaattgatgccttggaaatgtcttcaaatgattcaagatccagtctaataagaaaaagatcaactcgtaggagtgtccgtggatcacaagcccaagacagaaagcttagtaccaaagaggctctggatgaaagtatacctccagtttccttttggaggattatgaagctaaatttaactgaatggccttattttgttgttggtgtattttgtgccattataaatggaggcctgcaaccagcatttgcaataatattttcaaagattataggggtttttacaagaattgatgatcctgaaacaaaacgacagaatagtaacttgttttcactattgtttctagcccttggaattatttcttttattacatttttccttcagggtttcacatttggcaaagctggagagatcctcaccaagcggctccgatacatggttttccgatccatgctcagacaggatgtgagttggtttgatgaccctaaaaacaccactggagcattgactaccaggctcgccaatgatgctgctcaagttaaaggggctataggttccaggcttgctgtaattacccagaatatagcaaatcttgggacaggaataattatatccttcatctatggttggcaactaacactgttactcttagcaattgtacccatcattgcaatagcaggagttgttgaaatgaaaatgttgtctggacaagcactgaaagataagaaagaactagaaggttctgggaagatcgctactgaagcaatagaaaacttccgaaccgttgtttctttgactcaggagcagaagtttgaacatatgtatgctcagagtttgcaggtaccatacagaaactctttgaggaaagcacacatctttggaattacattttccttcacccaggcaatgatgtatttttcctatgctggatgtttccggtttggagcctacttggtggcacataaactcatgagctttgaggatgttctgttagtattttcagctgttgtctttggtgccatggccgtggggcaagtcagttcatttgctcctgactatgccaaagccaaaatatcagcagcccacatcatcatgatcattgaaaaaacccctttgattgacagctacagcacggaaggcctaatgccgaacacattggaaggaaatgtcacatttggtgaagttgtattcaactatcccacccgaccggacatcccagtgcttcagggactgagcctggaggtgaagaagggccagacgctggctctggtgggcagcagtggctgtgggaagagcacagtggtccagctcctggagcggttctacgaccccttggcagggaaagtgctgcttgatggcaaagaaataaagcgactgaatgttcagtggctccgagcacacctgggcatcgtgtcccaggagcccatcctgtttgactgcagcattgctgagaacattgcctatggagacaacagccgggtggtgtcacaggaagagattgtgagggcagcaaaggaggccaacatacatgccttcatcgagtcactgcctaataaatatagcactaaagtaggagacaaaggaactcagctctctggtggccagaaacaacgcattgccatagctcgtgcccttgttagacagcctcatattttgcttttggatgaagccacgtcagctctggatacagaaagtgaaaaggttgtccaagaagccctggacaaagccagagaaggccgcacctgcattgtgattgctcaccgcctgtccaccatccagaatgcagacttaatagtggtgtttcagaatggcagagtcaaggagcatggcacgcatcagcagctgctggcacagaaaggcatctatttttcaatggtcagtgtccaggctggaacaaagcgccag

SEQ ID NO: 162 - DNA, 990 bp, Homo sapiens
  misc_feature 1..990: note = Arginase1, isoform 1
  source 1..990: mol_type = genomic DNA
atgagcgccaagtccagaaccatagggattattggagctcctttctcaaagggacagccacgaggaggggtggaagaaggccctacagtattgagaaaggctggtctgcttgagaaacttaaagaacaagtaactcaaaactttttaattttagagtgtgatgtgaaggattatggggacctgccctttgctgacatccctaatgacagtccctttcaaattgtgaagaatccaaggtctgtgggaaaagcaagcgagcagctggctggcaaggtggcagaagtcaagaagaacggaagaatcagcctggtgctgggcggagaccacagtttggcaattggaagcatctctggccatgccagggtccaccctgatcttggagtcatctgggtggatgctcacactgatatcaacactccactgacaaccacaagtggaaacttgcatggacaacctgtatctttcctcctgaaggaactaaaaggaaagattcccgatgtgccaggattctcctgggtgactccctgtatatctgccaaggatattgtgtatattggcttgagagacgtggaccctggggaacactacattttgaaaactctaggcattaaatacttttcaatgactgaagtggacagactaggaattggcaaggtgatggaagaaacactcagctatctactaggaagaaagaaaaggccaattcatctaagttttgatgttgacggactggacccatctttcacaccagctactggcacaccagtcgtgggaggtctgacatacagagaaggtctctacatcacagaagaaatctacaaaacagggctactctcaggattagatataatggaagtgaacccatccctggggaagacaccagaagaagtaactcgaacagtgaacacagcagttgcaataaccttggcttgtttcggacttgctcgggagggtaatcacaagcctattgactaccttaacccacctaag

SEQ ID NO: 163 - DNA, 3459 bp, Homo sapiens
  misc_feature 1..3459: note = nitric oxide synthase, inducible (iNOS/NOS2),isoform 1
  source 1..3459: mol_type = genomic DNA
atggcctgtccttggaaatttctgttcaagaccaaattccaccagtatgcaatgaatggggaaaaagacatcaacaacaatgtggagaaagccccctgtgccacctccagtccagtgacacaggatgaccttcagtatcacaacctcagcaagcagcagaatgagtccccgcagcccctcgtggagacgggaaagaagtctccagaatctctggtcaagctggatgcaaccccattgtcctccccacggcatgtgaggatcaaaaactggggcagcgggatgactttccaagacacacttcaccataaggccaaagggattttaacttgcaggtccaaatcttgcctggggtccattatgactcccaaaagtttgaccagaggacccagggacaagcctacccctccagatgagcttctacctcaagctatcgaatttgtcaaccaatattacggctccttcaaagaggcaaaaatagaggaacatctggccagggtggaagcggtaacaaaggagatagaaacaacaggaacctaccaactgacgggagatgagctcatcttcgccaccaagcaggcctggcgcaatgccccacgctgcattgggaggatccagtggtccaacctgcaggtcttcgatgcccgcagctgttccactgcccgggaaatgtttgaacacatctgcagacacgtgcgttactccaccaacaatggcaacatcaggtcggccatcaccgtgttcccccagcggagtgatggcaagcacgacttccgggtgtggaatgctcagctcatccgctatgctggctaccagatgccagatggcagcatcagaggggaccctgccaacgtggaattcactcagctgtgcatcgacctgggctggaagcccaagtacggccgcttcgatgtggtccccctggtcctgcaggccaatggccgtgaccctgagctcttcgaaatcccacctgaccttgtgcttgaggtggccatggaacatcccaaatacgagtggtttcgggaactggagctaaagtggtacgccctgcctgcagtggccaacatgctgcttgaggtgggcggcctggagttcccagggtgccccttcaatggctggtacatgggcacagagatcggagtccgggacttctgtgacgtccagcgctacaacatcctggaggaagtgggcaggagaatgggcctggaaacgcacaagctggcctcgctctggaaagaccaggctgtcgttgagatcaacattgctgtgctccatagtttccagaagcagaatgtgaccatcatggaccaccactcggctgcagaatccttcatgaagtacatgcagaatgaataccggtcccgtgggggctgcccggcagactggatttggctggtccctcccatgtctgggagcatcacccccgtgtttcaccaggagatgctgaactacgtcctgtcccctttctactactatcaggtagaggcctggaaaacccatgtctggcaggacgagaagcggagacccaagagaagagagattccattgaaagtcttggtcaaagctgtgctctttgcctgtatgctgatgcgcaagacaatggcgtcccgagtcagagtcaccatcctctttgcgacagagacaggaaaatcagaggcgctggcctgggacctgggggccttattcagctgtgccttcaaccccaaggttgtctgcatggataagtacaggctgagctgcctggaggaggaacggctgctgttggtggtgaccagtacgtttggcaatggagactgccctggcaatggagagaaactgaagaaatcgctcttcatgctgaaagagctcaacaacaaattcaggtacgctgtgtttggcctcggctccagcatgtaccctcggttctgcgcctttgctcatgacattgatcagaagctgtcccacctgggggcctctcagctcaccccgatgggagaaggggatgagctcagtgggcaggaggacgccttccgcagctgggccgtgcaaaccttcaaggcagcctgtgagacgtttgatgtccgaggcaaacagcacattcagatccccaagctctacacctccaatgtgacctgggacccgcaccactacaggctcgtgcaggactcacagcctttggacctcagcaaagccctcagcagcatgcatgccaagaacgtgttcaccatgaggctcaaatctcggcagaatctacaaagtccgacatccagccgtgccaccatcctggtggaactctcctgtgaggatggccaaggcctgaactacctgccgggggagcaccttggggtttgcccaggcaaccagccggccctggtccaaggtatcctggagcgagtggtggatggccccacaccccaccagacagtgcgcctggaggccctggatgagagtggcagctactgggtcagtgacaagaggctgcccccctgctcactcagccaggccctcacctacttcctggacatcaccacacccccaacccagctgctgctccaaaagctggcccaggtggccacagaagagcctgagagacagaggctggaggccctgtgccagccctcagagtacagcaagtggaagttcaccaacagccccacattcctggaggtgctagaggagttcccgtccctgcgggtgtctgctggcttcctgctttcccagctccccattctgaagcccaggttctactccatcagctcctcccgggatcacacgcccacagagatccacctgactgtggccgtggtcacctaccacacccgagatggccagggtcccctgcaccacggcgtctgcagcacatggctcaacagcctgaagccccaagacccagtgccctgctttgtgcggaatgccagcggcttccacctccccgaggatccctcccatccttgcatcctcatcgggcctggcacaggcatcgcgcccttccgcagtttctggcagcaacggctccatgactcccagcacaagggagtgcggggaggccgcatgaccttggtgtttgggtgccgccgcccagatgaggaccacatctaccaggaggagatgctggagatggcccagaagggggtgctgcatgcggtgcacacagcctattcccgcctgcctggcaagcccaaggtctatgttcaggacatcctgcggcagcagctggccagcgaggtgctccgtgtgctccacaaggagccaggccacctctatgtttgcggggatgtgcgcatggcccgggacgtggcccacaccctgaagcagctggtggctgccaagctgaaattgaatgaggagcaggtcgaggactatttctttcagctcaagagccagaagcgctatcacgaagatatctttggtgctgtatttccttacgaggcgaagaaggacagggtggcggtgcagcccagcagcctggagatgtcagcgctc

SEQ ID NO: 164 - DNA, 3765 bp, Homo sapiens
  misc_feature 1..3765: note = Her2
  source 1..3765: mol_type = genomic DNA
atggagctggcggccttgtgccgctgggggctcctcctcgccctcttgccccccggagccgcgagcacccaagtgtgcaccggcacagacatgaagctgcggctccctgccagtcccgagacccacctggacatgctccgccacctctaccagggctgccaggtggtgcagggaaacctggaactcacctacctgcccaccaatgccagcctgtccttcctgcaggatatccaggaggtgcagggctacgtgctcatcgctcacaaccaagtgaggcaggtcccactgcagaggctgcggattgtgcgaggcacccagctctttgaggacaactatgccctggccgtgctagacaatggagacccgctgaacaataccacccctgtcacaggggcctccccaggaggcctgcgggagctgcagcttcgaagcctcacagagatcttgaaaggaggggtcttgatccagcggaacccccagctctgctaccaggacacgattttgtggaaggacatcttccacaagaacaaccagctggctctcacactgatagacaccaaccgctctcgggcctgccacccctgttctccgatgtgtaagggctcccgctgctggggagagagttctgaggattgtcagagcctgacgcgcactgtctgtgccggtggctgtgcccgctgcaaggggccactgcccactgactgctgccatgagcagtgtgctgccggctgcacgggccccaagcactctgactgcctggcctgcctccacttcaaccacagtggcatctgtgagctgcactgcccagccctggtcacctacaacacagacacgtttgagtccatgcccaatcccgagggccggtatacattcggcgccagctgtgtgactgcctgtccctacaactacctttctacggacgtgggatcctgcaccctcgtctgccccctgcacaaccaagaggtgacagcagaggatggaacacagcggtgtgagaagtgcagcaagccctgtgcccgagtgtgctatggtctgggcatggagcacttgcgagaggtgagggcagttaccagtgccaatatccaggagtttgctggctgcaagaagatctttgggagcctggcatttctgccggagagctttgatggggacccagcctccaacactgccccgctccagccagagcagctccaagtgtttgagactctggaagagatcacaggttacctatacatctcagcatggccggacagcctgcctgacctcagcgtcttccagaacctgcaagtaatccggggacgaattctgcacaatggcgcctactcgctgaccctgcaagggctgggcatcagctggctggggctgcgctcactgagggaactgggcagtggactggccctcatccaccataacacccacctctgcttcgtgcacacggtgccctgggaccagctctttcggaacccgcaccaagctctgctccacactgccaaccggccagaggacgagtgtgtgggcgagggcctggcctgccaccagctgtgcgcccgagggcactgctggggtccagggcccacccagtgtgtcaactgcagccagttccttcggggccaggagtgcgtggaggaatgccgagtactgcaggggctccccagggagtatgtgaatgccaggcactgtttgccgtgccaccctgagtgtcagccccagaatggctcagtgacctgttttggaccggaggctgaccagtgtgtggcctgtgcccactataaggaccctcccttctgcgtggcccgctgccccagcggtgtgaaacctgacctctcctacatgcccatctggaagtttccagatgaggagggcgcatgccagccttgccccatcaactgcacccactcctgtgtggacctggatgacaagggctgccccgccgagcagagagccagccctctgacgtccatcatctctgcggtggttggcattctgctggtcgtggtcttgggggtggtctttgggatcctcatcaagcgacggcagcagaagatccggaagtacacgatgcggagactgctgcaggaaacggagctggtggagccgctgacacctagcggagcgatgcccaaccaggcgcagatgcggatcctgaaagagacggagctgaggaaggtgaaggtgcttggatctggcgcttttggcacagtctacaagggcatctggatccctgatggggagaatgtgaaaattccagtggccatcaaagtgttgagggaaaacacatcccccaaagccaacaaagaaatcttagacgaagcatacgtgatggctggtgtgggctccccatatgtctcccgccttctgggcatctgcctgacatccacggtgcagctggtgacacagcttatgccctatggctgcctcttagaccatgtccgggaaaaccgcggacgcctgggctcccaggacctgctgaactggtgtatgcagattgccaaggggatgagctacctggaggatgtgcggctcgtacacagggacttggccgctcggaacgtgctggtcaagagtcccaaccatgtcaaaattacagacttcgggctggctcggctgctggacattgacgagacagagtaccatgcagatgggggcaaggtgcccatcaagtggatggcgctggagtccattctccgccggcggttcacccaccagagtgatgtgtggagttatggtgtgactgtgtgggagctgatgacttttggggccaaaccttacgatgggatcccagcccgggagatccctgacctgctggaaaagggggagcggctgccccagccccccatctgcaccattgatgtctacatgatcatggtcaaatgttggatgattgactctgaatgtcggccaagattccgggagttggtgtctgaattctcccgcatggccagggacccccagcgctttgtggtcatccagaatgaggacttgggcccagccagtcccttggacagcaccttctaccgctcactgctggaggacgatgacatgggggacctggtggatgctgaggagtatctggtaccccagcagggcttcttctgtccagaccctgccccgggcgctgggggcatggtccaccacaggcaccgcagctcatctaccaggagtggcggtggggacctgacactagggctggagccctctgaagaggaggcccccaggtctccactggcaccctccgaaggggctggctccgatgtatttgatggtgacctgggaatgggggcagccaaggggctgcaaagcctccccacacatgaccccagccctctacagcggtacagtgaggaccccacagtacccctgccctctgagactgatggctacgttgcccccctgacctgcagcccccagcctgaatatgtgaaccagccagatgttcggccccagcccccttcgccccgagagggccctctgcctgctgcccgacctgctggtgccactctggaaaggcccaagactctctccccagggaagaatggggtcgtcaaagacgtttttgcctttgggggtgccgtggagaaccccgagtacttgacaccccagggaggagctgcccctcagccccaccctcctcctgccttcagcccagccttcgacaacctctattactgggaccaggacccaccagagcggggggctccacccagcaccttcaaagggacacctacggcagagaacccagagtacctgggtctggacgtgccagtg

SEQ ID NO: 165 - DNA, 567 bp, Homo sapiens
  misc_feature 1..567: note = KRAS
  source 1..567: mol_type = genomic DNA
atgactgaatataaacttgtggtagttggagctggtggcgtaggcaagagtgccttgacgatacagctaattcagaatcattttgtggacgaatatgatccaacaatagaggattcctacaggaagcaagtagtaattgatggagaaacctgtctcttggatattctcgacacagcaggtcaagaggagtacagtgcaatgagggaccagtacatgaggactggggagggctttctttgtgtatttgccataaataatactaaatcatttgaagatattcaccattatagagaacaaattaaaagagttaaggactctgaagatgtacctatggtcctagtaggaaataaatgtgatttgccttctagaacagtagacacaaaacaggctcaggacttagcaagaagttatggaattccttttattgaaacatcagcaaagacaagacagagagtggaggatgctttttatacattggtgagggagatccgacaatacagattgaaaaaaatcagcaaagaagaaaagactcctggctgtgtgaaaattaaaaaatgcattataatg

SEQ ID NO: 166 - DNA, 1809 bp, Homo sapiens
  misc_feature 1..1809: note = PLK1
  source 1..1809: mol_type = genomic DNA
atgagtgctgcagtgactgcagggaagctggcacgggcaccggccgaccctgggaaagccggggtccccggagttgcagctcccggagctccggcggcggctccaccggcgaaagagatcccggaggtcctagtggacccacgcagccggcggcgctatgtgcggggccgctttttgggcaagggcggctttgccaagtgcttcgagatctcggacgcggacaccaaggaggtgttcgcgggcaagattgtgcctaagtctctgctgctcaagccgcaccagagggagaagatgtccatggaaatatccattcaccgcagcctcgcccaccagcacgtcgtaggattccacggctttttcgaggacaacgacttcgtgttcgtggtgttggagctctgccgccggaggtctctcctggagctgcacaagaggaggaaagccctgactgagcctgaggcccgatactacctacggcaaattgtgcttggctgccagtacctgcaccgaaaccgagttattcatcgagacctcaagctgggcaaccttttcctgaatgaagatctggaggtgaaaataggggattttggactggcaaccaaagtcgaatatgacggggagaggaagaagaccctgtgtgggactcctaattacatagctcccgaggtgctgagcaagaaagggcacagtttcgaggtggatgtgtggtccattgggtgtatcatgtataccttgttagtgggcaaaccaccttttgagacttcttgcctaaaagagacctacctccggatcaagaagaatgaatacagtattcccaagcacatcaaccccgtggccgcctccctcatccagaagatgcttcagacagatcccactgcccgcccaaccattaacgagctgcttaatgacgagttctttacttctggctatatccctgcccgtctccccatcacctgcctgaccattccaccaaggttttcgattgctcccagcagcctggaccccagcaaccggaagcccctcacagtcctcaataaaggcttggagaaccccctgcctgagcgtccccgggaaaaagaagaaccagtggttcgagagacaggtgaggtggtcgactgccacctcagtgacatgctgcagcagctgcacagtgtcaatgcctccaagccctcggagcgtgggctggtcaggcaagaggaggctgaggatcctgcctgcatccccatcttctgggtcagcaagtgggtggactattcggacaagtacggccttgggtatcagctctgtgataacagcgtgggggtgctcttcaatgactcaacacgcctcatcctctacaatgatggtgacagcctgcagtacatagagcgtgacggcactgagtcctacctcaccgtgagttcccatcccaactccttgatgaagaagatcaccctccttaaatatttccgcaattacatgagcgagcacttgctgaaggcaggtgccaacatcacgccgcgcgaaggtgatgagctcgcccggctgccctacctacggacctggttccgcacccgcagcgccatcatcctgcacctcagcaacggcagcgtgcagatcaacttcttccaggatcacaccaagctcatcttgtgcccactgatggcagccgtgacctacatcgacgagaagcgggacttccgcacataccgcctgagtctcctggaggagtacggctgctgcaaggagctggccagccggctccgctacgcccgcactatggtggacaagctgctgagctcacgctcggccagcaaccgtctcaaggcctcc

SEQ ID NO: 167 - DNA, 876 bp, Salmonella typhimurium
  misc_feature 1..876: note = dapA, strain LT2
  source 1..876: mol_type = genomic DNA
atgttcacgggaagtattgtcgcgcttgttacgccgatggatgagaaaggtaacgtcagtaggtcttgcctgaaaaaactcattgattatcatgtcgccaacggtacctcggcgattgtttcggttggcactaccggcgagtctgccacgctaagccatgatgaacatggcgatgtcgtgatgatgacgctggaactggctgacggacgtattccggttatcgccggcacgggcgcaaacgcgaccgcggaagcgattagcctgacgcagcgttttaacgatagcggtattgtaggctgcctgacggtaacgccgtactacaatcgccccacgcaggaaggtttgttccagcatttcaaagccatcgcggaacacactgacttgccgcaaattctgtataatgtgccgtcccgtaccggttgcgatatgttgccggaaaccgtgggtcgtctggcggaaataaaaaatattatcgctatcaaagaggcgacagggaacttaacccgcgttcaccagatcaaagagctggtttcagacgattttattctgcttagcggcgatgacgcgtctgcgctggactttatgcaactgggtggtcatggcgtgatttccgttacggctaacgtagcggcgcgcgagatggctgacatgtgcaaactggcggcggaagggcaatttgccgaggcgcgcgctatcaaccagcgtctgatgccgttacacaacaaactatttgtcgaacccaatcctatcccggtgaaatgggcatgtaaggcattgggtcttgtggcgaccgacacgctgcgcctgccaatgacgcctatcacggaccatggtcgtgacatcgtcaaagcagcgcttcagcatgctggcctgctg

SEQ ID NO: 168 - DNA, 819 bp, Salmonella typhimurium
  misc_feature 1..819: note = dapB, strain LT2
  source 1..819: mol_type = genomic DNA
atgcatgaagcacaaatccgcgtcgccattgccggcgccggtggccgcatgggacggcagttaatccaggccgccatggcgatggaaggtgttcagctgggtgccgcgctggagcgcgaaggctcttccttgctgggcagcgatgctggcgaactggcaggggcgggaaagtccggcgtgatcgttcaaagcagccttgaggcggtaaaagatgattttgacgttttcatcgattttacccgtccggaaggcacgttgacgcatctggcgttttgccgccagcatggtaaagggatggtgattggtactaccggctttgacgacgccggtaaacaagccattcgcgaggcgtcacaagagattgcgatcgttttcgccgcaaactttagcgtcggcgttaacgtcatgctcaagctgctggagaaagccgcgaaggtaatgggcgactatagcgatattgaaattattgaagcgcaccaccgccataaagtggatgcaccgtcgggtacggcgctggcaatgggcgaggcaatcgccggggcgctggataaaaatctgaaggactgcgcggtctactcgcgtgaaggttataccggcgagcgcgtagcgggcacgattggctttgcgaccgttcgggcgggcgacatcgtcggcgaacataccgcgatgtttgccgatattggcgagcgcgtagagattacgcataaagcttccagccgcatgacgtttgcaaatggcgcgttgcgatcggcgttatggctaaaaacgaagaaaaatgggctatttgacatgcgggatgtgctggggctggatgtatta

SEQ ID NO: 169 - DNA, 876 bp, Escherichia coli
  misc_feature 1..876: note = dapA
  source 1..876: mol_type = genomic DNA
atgttcacgggaagtattgtcgcgattgttactccgatggatgaaaaaggtaatgtctgtcgggctagcttgaaaaaactgattgattatcatgtcgccagcggtacttcggcgatcgtttctgttggcaccactggcgagtccgctaccttaaatcatgacgaacatgctgatgtggtgatgatgacgctggatctggctgatgggcgcattccggtaattgccgggaccggcgctaacgctactgcggaagccattagcctgacgcagcgcttcaatgacagtggtatcgtcggctgcctgacggtaaccccttactacaatcgtccgtcgcaagaaggtttgtatcagcatttcaaagccatcgctgagcatactgacctgccgcaaattctgtataatgtgccgtcccgtactggctgcgatctgctcccggaaacggtgggccgtctggcgaaagtaaaaaatattatcggaatcaaagaggcaacagggaacttaacgcgtgtaaaccagatcaaagagctggtttcagatgattttgttctgctgagcggcgatgatgcgagcgcgctggacttcatgcaattgggcggtcatggggttatttccgttacgactaacgtcgcagcgcgtgatatggcccagatgtgcaaactggcagcagaagaacattttgccgaggcacgcgttattaatcagcgtctgatgccattacacaacaaactatttgtcgaacccaatccaatcccggtgaaatgggcatgtaaggaactgggtcttgtggcgaccgatacgctgcgcctgccaatgacaccaatcaccgacagtggtcgtgagacggtcagagcggcgcttaagcatgccggtttgctg

SEQ ID NO: 170 - DNA, 819 bp, Escherichia coli
  misc_feature 1..819: note = dapB
  source 1..819: mol_type = genomic DNA
atgcatgatgcaaacatccgcgttgccatcgcgggagccggggggcgtatgggccgccagttgattcaggcggcgctggcattagagggcgtgcagttgggcgctgcgctggagcgtgaaggatcttctttactgggcagcgacgccggtgagctggccggagccgggaaaacaggcgttaccgtgcaaagcagcctcgatgcggtaaaagatgattttgatgtgtttatcgattttacccgtccggaaggtacgctgaaccatctcgctttttgtcgccagcatggcaaagggatggtgatcggcactacggggtttgacgaagccggtaaacaagcaattcgtgacgccgctgccgatattgcgattgtctttgcggccaattttagcgttggcgttaacgtcatgcttaagctgctggagaaagcagccaaagtgatgggtgactacaccgatatcgaaattattgaagcacatcatagacataaagttgatgcgccgtcaggcaccgcactggcaatgggagaggcgatcgcccacgcccttgataaagatctgaaagattgcgcggtctacagtcgtgaaggccacaccggtgaacgtgtgcctggcaccattggttttgccaccgtgcgtgcaggtgacatcgttggtgaacataccgcgatgtttgccgatattggcgagcgtctggagatcacccataaggcgtccagccgtatgacatttgctaacggcgcggtaagatcggctttgtggttgagtggtaaggaaagcggtctttttgatatgcgagatgtacttgatctcaataatttg

SEQ ID NO: 171 - DNA, 1218 bp, Escherichia coli
  misc_feature 1..1218: note = dapC
  source 1..1218: mol_type = genomic DNA
atggcaattgaacaaacagcaattacacgcgcgactttcgatgaagtgatcctgccgatttatgctccggcagagtttattccggtaaaaggtcagggcagccgaatctgggatcagcaaggcaaggagtatgtcgatttcgcgggtggcattgcagttacggcgttgggccattgccatcctgcgctggtgaacgcgttaaaaacccagggcgaaactctgtggcatatcagtaacgttttcaccaatgaaccggcgctgcgtcttgggcgtaaactgattgaggcaacgtttgccgaacgcgtggtgtttatgaactccggcacggaagctaacgaaaccgcctttaaactggcacgccattacgcctgtgtgcgtcatagcccgttcaaaaccaaaattattgccttccataacgcttttcatggtcgctcgctgtttaccgtttcggtgggtgggcagccaaaatattccgacggctttgggccgaaaccggcagacatcatccacgttccctttaacgatctccatgcagtgaaagcggtgatggatgatcacacctgtgcggtggtggttgagccgatccagggcgagggcggtgtgacggcagcgacgccagagtttttgcagggcttgcgcgagctgtgcgatcaacatcaggcattattggtgtttgatgaagtgcagtgcgggatggggcggaccggcgatttgtttgcttacatgcactacgcgttagcgccggatattctgacctctgcgaaagcgttaggcggcggcttcccgattagcgccatgctgaccacggcggaaattgcttctgcgtttcatcctggttctcacggttccacctacggcggtaatcctctggcctgtgcagtagcgggggcggcgtttgatatcatcaatacccctgaagtgctggaaggcattcaggcgaaacgccagcgttttgttgaccatctgcagaagatcgatcagcagtacgatgtatttagcgatattcgcggtatggggctgttgattggcgcagagctgaaaccacagtacaaaggtcgggcgcgtgatttcctgtatgcgggcgcagaggctggcgtaatggtgctgaatgccggaccggatgtgatgcgttttgcaccgtcgctggtggtggaagatgcggatatcgatgaagggatgcaacgtttcgcccacgcggtggcgaaggtggttggggcg

SEQ ID NO: 172 - DNA, 822 bp, Escherichia coli
  misc_feature 1..822: note = dapD
  source 1..822: mol_type = genomic DNA
atgcagcagttacagaacattattgaaaccgcttttgaacgccgtgccgagatcacgccagccaatgcagacaccgttacccgcgaagcggataatcaggtgatcgccctgctggattccggcgcactgcgtgtagcggaaaaaattgacggtcagtgggtgacgcatcagtggttgaaaaaagcggtgctgctctctttccgtattaatgataatcaggtgatcgaaggggcagaaagccgctacttcgacaaagtgccgatgaaattcgccgactacgacgaagcacgtttccagaaagaaggcttccgcgttgtgccaccagcggcggtacgtcagggtgcgtttattgcccgtaacaccgtgctgatgccgtcttacgtcaacatcggcgcatatgttgatgaaggcaccatggttgatacctgggcgaccgtcggttcttgtgcgcagattggtaaaaacgttcacctttccggtggcgtgcgcatcggcggcgtgctggaaccgctgcaggctaacccaaccatgattgaagataattgcttcatcggcgcgcgctctgaactggttgaaggggtgattgtcgaagaaggttccgtcatttccatgggcgtatacattggtcagagcacccgtatttacgaccgtgaaaccggcgaaatccactacggtcgcgttccggcggggtctgtggttgtttcaggtaatctgccgtcaaaagatggcaaatacagcctctactgtgcggttatcgttaagaaagttgacgcgaaaactcgcggcaaagtcggcattaacgaactgctgcgtaccatcgac

SEQ ID NO: 173 - DNA, 1125 bp, Escherichia coli
  misc_feature 1..1125: note = dapE
  source 1..1125: mol_type = genomic DNA
atgtcgtgcccggttattgagctgacacaacagcttattcgccgcccttccctgagtcctgatgatgcaggatgccaggctttgttgattgaacgtttgcaggcgatcggttttaccgttgaacgcatggactttgccgatacgcagaatttttgggcatggcgtgggcagggtgaaacgttagcctttgccgggcataccgacgtggtgccgcctggcgacgccgatcgttggatcaatcccccgtttgaacccaccattcgtgacggcatgttattcgggcgcggtgcggcagatatgaaaggctcgctggcggcgatggtggtggcggcagaacgttttgtcgcacaacatcccaaccatacggggcgactggcatttctgatcacctctgatgaagaagccagtgcccacaacggtacggtaaaagtcgtcgaagcgttaatggcacgtaatgagcgtctcgattactgcctggttggcgaaccgtcgagtatcgaagtggtaggtgatgtggtgaaaaatggtcgtcgcggatcattaacctgcaaccttaccattcatggcgttcaggggcatgttgcctacccacatctggctgacaatccggtacatcgcgcagcacctttccttaatgaattagtggctattgagtgggatcagggcaatgaattcttcccggcgaccagtatgcagattgccaatattcaggcgggaacgggcagtaacaacgttattccgggtgaactgtttgtgcagtttaacttccgcttcagcaccgaactgactgatgagatgatcaaagcgcaggtgcttgccctgcttgaaaaacatcaactgcgctatacggtggattggtggctttccgggcagccatttttgaccgcgcgcggtaaactggtggatgcggtcgttaacgcggttgagcactataatgaaattaaaccgcagctactgaccacaggcggaacgtccgacgggcgctttattgcccgcatgggggcgcaggtggtggaactcgggccggtcaatgccactattcataaaattaatgaatgtgtgaacgctgccgacctgcagctacttgcccgtatgtatcaacgtatcatggaacagctcgtcgcc

SEQ ID NO: 174 - DNA, 1179 bp, Homo sapiens
  misc_feature 1..1179: note = p53
  source 1..1179: mol_type = genomic DNA
atggaggagccgcagtcagatcctagcgtcgagccccctctgagtcaggaaacattttcagacctatggaaactacttcctgaaaacaacgttctgtcccccttgccgtcccaagcaatggatgatttgatgctgtccccggacgatattgaacaatggttcactgaagacccaggtccagatgaagctcccagaatgccagaggctgctccccgcgtggcccctgcaccagcagctcctacaccggcggcccctgcaccagccccctcctggcccctgtcatcttctgtcccttcccagaaaacctaccagggcagctacggtttccgtctgggcttcttgcattctgggacagccaagtctgtgacttgcacgtactcccctgccctcaacaagatgttttgccaactggccaagacctgccctgtgcagctgtgggttgattccacacccccgcccggcacccgcgtccgcgccatggccatctacaagcagtcacagcacatgacggaggttgtgaggcgctgcccccaccatgagcgctgctcagatagcgatggtctggcccctcctcagcatcttatccgagtggaaggaaatttgcgtgtggagtatttggatgacagaaacacttttcgacatagtgtggtggtgccctatgagccgcctgaggttggctctgactgtaccaccatccactacaactacatgtgtaacagttcctgcatgggcggcatgaaccggaggcccatcctcaccatcatcacactggaagactccagtggtaatctactgggacggaacagctttgaggtgcatgtttgtgcctgtcctgggagagaccggcgcacagaggaagagaatctccgcaagaaaggggagcctcaccacgagctgcccccagggagcactaagcgagcactgtccaacaacaccagctcctctccccagccaaagaagaaaccactggatggagaatatttcacccttcagatccgtgggcgtgagcgcttcgagatgttccgagagctgaatgaggccttggaactcaaggatgcccaggctgggaaggagccaggggggagcagggctcactccagccacctgaagtccaaaaagggtcagtctacctcccgccataaaaaactcatgttcaagacagaagggcctgactcagac

SEQ ID NO: 175 - DNA, 1470 bp, Homo sapiens
  misc_feature 1..1470: note = ERBA
  source 1..1470: mol_type = genomic DNA
atggaacagaagccaagcaaggtggagtgtgggtcagacccagaggagaacagtgccaggtcaccagatggaaagcgaaaaagaaagaacggccaatgttccctgaaaaccagcatgtcagggtatatccctagttacctggacaaagacgagcagtgtgtcgtgtgtggggacaaggcaactggttatcactaccgctgtatcacttgtgagggctgcaagggcttctttcgccgcacaatccagaagaacctccatcccacctattcctgcaaatatgacagctgctgtgtcattgacaagatcacccgcaatcagtgccagctgtgccgcttcaagaagtgcatcgccgtgggcatggccatggacttggttctagatgactcgaagcgggtggccaagcgtaagctgattgagcagaaccgggagcggcggcggaaggaggagatgatccgatcactgcagcagcgaccagagcccactcctgaagagtgggatctgatccacattgccacagaggcccatcgcagcaccaatgcccagggcagccattggaaacagaggcggaaattcctgcccgatgacattggccagtcacccattgtctccatgccggacggagacaaggtggacctggaagccttcagcgagtttaccaagatcatcaccccggccatcacccgtgtggtggactttgccaaaaaactgcccatgttctccgagctgccttgcgaagaccagatcatcctcctgaaggggtgctgcatggagatcatgtccctgcgggcggctgtccgctacgaccctgagagcgacaccctgacgctgagtggggagatggctgtcaagcgggagcagctcaagaatggcggcctgggcgtagtctccgacgccatctttgaactgggcaagtcactctctgcctttaacctggatgacacggaagtggctctgctgcaggctgtgctgctaatgtcaacagaccgctcgggcctgctgtgtgtggacaagatcgagaagagtcaggaggcgtacctgctggcgttcgagcactacgtcaaccaccgcaaacacaacattccgcacttctggcccaagctgctgatgaaggagagagaagtgcagagttcgattctgtacaagggggcagcggcagaaggccggccgggcgggtcactgggcgtccacccggaaggacagcagcttctcggaatgcatgttgttcagggtccgcaggtccggcagcttgagcagcagcttggtgaagcgggaagtctccaagggccggttcttcagcaccagagcccgaagagcccgcagcagcgtctcctggagctgctccaccgaagcggaattctccatgcccgagcggtctgtggggaagacgacagcagtgaggcggactccccgagctcctctgaggaggaaccggaggtctgcgaggacctggcaggcaatgcagcctctccc

SEQ ID NO: 176 - DNA, 1317 bp, Homo sapiens
  misc_feature 1..1317: note = myc
  source 1..1317: mol_type = genomic DNA
atgcccctcaacgttagcttcaccaacaggaactatgacctcgactacgactcggtgcagccgtatttctactgcgacgaggaggagaacttctaccagcagcagcagcagagcgagctgcagcccccggcgcccagcgaggatatctggaagaaattcgagctgctgcccaccccgcccctgtcccctagccgccgctccgggctctgctcgccctcctacgttgcggtcacacccttctcccttcggggagacaacgacggcggtggcgggagcttctccacggccgaccagctggagatggtgaccgagctgctgggaggagacatggtgaaccagagtttcatctgcgacccggacgacgagaccttcatcaaaaacatcatcatccaggactgtatgtggagcggcttctcggccgccgccaagctcgtctcagagaagctggcctcctaccaggctgcgcgcaaagacagcggcagcccgaaccccgcccgcggccacagcgtctgctccacctccagcttgtacctgcaggatctgagcgccgccgcctcagagtgcatcgacccctcggtggtcttcccctaccctctcaacgacagcagctcgcccaagtcctgcgcctcgcaagactccagcgccttctctccgtcctcggattctctgctctcctcgacggagtcctccccgcagggcagccccgagcccctggtgctccatgaggagacaccgcccaccaccagcagcgactctgaggaggaacaagaagatgaggaagaaatcgatgttgtttctgtggaaaagaggcaggctcctggcaaaaggtcagagtctggatcaccttctgctggaggccacagcaaacctcctcacagcccactggtcctcaagaggtgccacgtctccacacatcagcacaactacgcagcgcctccctccactcggaaggactatcctgctgccaagagggtcaagttggacagtgtcagagtcctgagacagatcagcaacaaccgaaaatgcaccagccccaggtcctcggacaccgaggagaatgtcaagaggcgaacacacaacgtcttggagcgccagaggaggaacgagctaaaacggagcttttttgccctgcgtgaccagatcccggagttggaaaacaatgaaaaggcccccaaggtagttatccttaaaaaagccacagcatacatcctgtccgtccaagcagaggagcaaaagctcatttctgaagaggacttgttgcggaaacgacgagaacagttgaaacacaaacttgaacagctacggaactcttgtgcg

SEQ ID NO: 177 - DNA, 2283 bp, Homo sapiens
  misc_feature 1..2283: note = MYB
  source 1..2283: mol_type = genomic DNA
atggcccgaagaccccggcacagcatatatagcagtgacgaggatgatgaggactttgagatgtgtgaccatgactatgatgggctgcttcccaagtctggaaagcgtcacttggggaaaacaaggtggacccgggaagaggatgaaaaactgaagaagctggtggaacagaatggaacagatgactggaaagttattgccaattatctcccgaatcgaacagatgtgcagtgccagcaccgatggcagaaagtactaaaccctgagctcatcaagggtccttggaccaaagaagaagatcagagagtgatagagcttgtacagaaatacggtccgaaacgttggtctgttattgccaagcacttaaaggggagaattggaaaacaatgtagggagaggtggcataaccacttgaatccagaagttaagaaaacctcctggacagaagaggaagacagaattatttaccaggcacacaagagactggggaacagatgggcagaaatcgcaaagctactgcctggacgaactgataatgctatcaagaaccactggaattctacaatgcgtcggaaggtcgaacaggaaggttatctgcaggagtcttcaaaagccagccagccagcagtggccacaagcttccagaagaacagtcatttgatgggttttgctcaggctccgcctacagctcaactccctgccactggccagcccactgttaacaacgactattcctattaccacatttctgaagcacaaaatgtctccagtcatgttccataccctgtagcgttacatgtaaatatagtcaatgtccctcagccagctgccgcagccattcagagacactataatgatgaagaccctgagaaggaaaagcgaataaaggaattagaattgctcctaatgtcaaccgagaatgagctaaaaggacagcaggtgctaccaacacagaaccacacatgcagctaccccgggtggcacagcaccaccattgccgaccacaccagacctcatggagacagtgcacctgtttcctgtttgggagaacaccactccactccatctctgccagcggatcctggctccctacctgaagaaagcgcctcgccagcaaggtgcatgatcgtccaccagggcaccattctggataatgttaagaacctcttagaatttgcagaaacactccaatttatagattctgattcttcatcatggtgtgatctcagcagttttgaattctttgaagaagcagatttttcacctagccaacatcacacaggcaaagccctacagcttcagcaaagagagggcaatgggactaaacctgcaggagaacctagcccaagggtgaacaaacgtatgttgagtgagagttcacttgacccacccaaggtcttacctcctgcaaggcacagcacaattccactggtcatccttcgaaaaaaacggggccaggccagccccttagccactggagactgtagctccttcatatttgctgacgtcagcagttcaactcccaagcgttcccctgtcaaaagcctacccttctctccctcgcagttcttaaacacttccagtaaccatgaaaactcagacttggaaatgccttctttaacttccacccccctcattggtcacaaattgactgttacaacaccatttcatagagaccagactgtgaaaactcaaaaggaaaatactgtttttagaaccccagctatcaaaaggtcaatcttagaaagctctccaagaactcctacaccattcaaacatgcacttgcagctcaagaaattaaatacggtcccctgaagatgctacctcagacaccctctcatctagtagaagatctgcaggatgtgatcaaacaggaatctgatgaatctggaattgttgctgagtttcaagaaaatggaccacccttactgaagaaaatcaaacaagaggtggaatctccaactgataaatcaggaaacttcttctgctcacaccactgggaaggggacagtctgaatacccaactgttcacgcagacctcgcctgtggcagatgcaccgaatattcttacaagctccgttttaatggcaccagcatcagaagatgaagacaatgttctcaaagcatttacagtacctaaaaacaggtccctggcgagccccttgcagccttgtagcagtacctgggaacctgcatcctgtggaaagatggaggagcagatgacatcttccagtcaagctcgtaaatacgtgaatgcattctcagcccggacgctggtcatg

SEQ ID NO: 178 - DNA, 993 bp, Homo sapiens
  misc_feature 1..993: note = JUN
  source 1..993: mol_type = genomic DNA
atgactgcaaagatggaaacgaccttctatgacgatgccctcaacgcctcgttcctcccgtccgagagcggaccttatggctacagtaaccccaagatcctgaaacagagcatgaccctgaacctggccgacccagtggggagcctgaagccgcacctccgcgccaagaactcggacctcctcacctcgcccgacgtggggctgctcaagctggcgtcgcccgagctggagcgcctgataatccagtccagcaacgggcacatcaccaccacgccgacccccacccagttcctgtgccccaagaacgtgacagatgagcaggagggcttcgccgagggcttcgtgcgcgccctggccgaactgcacagccagaacacgctgcccagcgtcacgtcggcggcgcagccggtcaacggggcaggcatggtggctcccgcggtagcctcggtggcagggggcagcggcagcggcggcttcagcgccagcctgcacagcgagccgccggtctacgcaaacctcagcaacttcaacccaggcgcgctgagcagcggcggcggggcgccctcctacggcgcggccggcctggcctttcccgcgcaaccccagcagcagcagcagccgccgcaccacctgccccagcagatgcccgtgcagcacccgcggctgcaggccctgaaggaggagcctcagacagtgcccgagatgcccggcgagacaccgcccctgtcccccatcgacatggagtcccaggagcggatcaaggcggagaggaagcgcatgaggaaccgcatcgctgcctccaagtgccgaaaaaggaagctggagagaatcgcccggctggaggaaaaagtgaaaaccttgaaagctcagaactcggagctggcgtccacggccaacatgctcagggaacaggtggcacagcttaaacagaaagtcatgaaccacgttaacagtgggtgccaactcatgctaacgcagcagttgcaaacattt

SEQ ID NO: 179 - DNA, 3633 bp, Homo sapiens
  misc_feature 1..3633: note = ERBB
  source 1..3633: mol_type = genomic DNA
atgcgaccctccgggacggccggggcagcgctcctggcgctgctggctgcgctctgcccggcgagtcgggctctggaggaaaagaaagtttgccaaggcacgagtaacaagctcacgcagttgggcacttttgaagatcattttctcagcctccagaggatgttcaataactgtgaggtggtccttgggaatttggaaattacctatgtgcagaggaattatgatctttccttcttaaagaccatccaggaggtggctggttatgtcctcattgccctcaacacagtggagcgaattcctttggaaaacctgcagatcatcagaggaaatatgtactacgaaaattcctatgccttagcagtcttatctaactatgatgcaaataaaaccggactgaaggagctgcccatgagaaatttacaggaaatcctgcatggcgccgtgcggttcagcaacaaccctgccctgtgcaacgtggagagcatccagtggcgggacatagtcagcagtgactttctcagcaacatgtcgatggacttccagaaccacctgggcagctgccaaaagtgtgatccaagctgtcccaatgggagctgctggggtgcaggagaggagaactgccagaaactgaccaaaatcatctgtgcccagcagtgctccgggcgctgccgtggcaagtcccccagtgactgctgccacaaccagtgtgctgcaggctgcacaggcccccgggagagcgactgcctggtctgccgcaaattccgagacgaagccacgtgcaaggacacctgccccccactcatgctctacaaccccaccacgtaccagatggatgtgaaccccgagggcaaatacagctttggtgccacctgcgtgaagaagtgtccccgtaattatgtggtgacagatcacggctcgtgcgtccgagcctgtggggccgacagctatgagatggaggaagacggcgtccgcaagtgtaagaagtgcgaagggccttgccgcaaagtgtgtaacggaataggtattggtgaatttaaagactcactctccataaatgctacgaatattaaacacttcaaaaactgcacctccatcagtggcgatctccacatcctgccggtggcatttaggggtgactccttcacacatactcctcctctggatccacaggaactggatattctgaaaaccgtaaaggaaatcacagggtttttgctgattcaggcttggcctgaaaacaggacggacctccatgcctttgagaacctagaaatcatacgcggcaggaccaagcaacatggtcagttttctcttgcagtcgtcagcctgaacataacatccttgggattacgctccctcaaggagataagtgatggagatgtgataatttcaggaaacaaaaatttgtgctatgcaaatacaataaactggaaaaaactgtttgggacctccggtcagaaaaccaaaattataagcaacagaggtgaaaacagctgcaaggccacaggccaggtctgccatgccttgtgctcccccgagggctgctggggcccggagcccagggactgcgtctcttgccggaatgtcagccgaggcagggaatgcgtggacaagtgcaaccttctggagggtgagccaagggagtttgtggagaactctgagtgcatacagtgccacccagagtgcctgcctcaggccatgaacatcacctgcacaggacggggaccagacaactgtatccagtgtgcccactacattgacggcccccactgcgtcaagacctgcccggcaggagtcatgggagaaaacaacaccctggtctggaagtacgcagacgccggccatgtgtgccacctgtgccatccaaactgcacctacggatgcactgggccaggtcttgaaggctgtccaacgaatgggcctaagatcccgtccatcgccactgggatggtgggggccctcctcttgctgctggtggtggccctggggatcggcctcttcatgcgaaggcgccacatcgttcggaagcgcacgctgcggaggctgctgcaggagagggagcttgtggagcctcttacacccagtggagaagctcccaaccaagctctcttgaggatcttgaaggaaactgaattcaaaaagatcaaagtgctgggctccggtgcgttcggcacggtgtataagggactctggatcccagaaggtgagaaagttaaaattcccgtcgctatcaaggaattaagagaagcaacatctccgaaagccaacaaggaaatcctcgatgaagcctacgtgatggccagcgtggacaacccccacgtgtgccgcctgctgggcatctgcctcacctccaccgtgcagctcatcacgcagctcatgcccttcggctgcctcctggactatgtccgggaacacaaagacaatattggctcccagtacctgctcaactggtgtgtgcagatcgcaaagggcatgaactacttggaggaccgtcgcttggtgcaccgcgacctggcagccaggaacgtactggtgaaaacaccgcagcatgtcaagatcacagattttgggctggccaaactgctgggtgcggaagagaaagaataccatgcagaaggaggcaaagtgcctatcaagtggatggcattggaatcaattttacacagaatctatacccaccagagtgatgtctggagctacggggtgactgtttgggagttgatgacctttggatccaagccatatgacggaatccctgccagcgagatctcctccatcctggagaaaggagaacgcctccctcagccacccatatgtaccatcgatgtctacatgatcatggtcaagtgctggatgatagacgcagatagtcgcccaaagttccgtgagttgatcatcgaattctccaaaatggcccgagacccccagcgctaccttgtcattcagggggatgaaagaatgcatttgccaagtcctacagactccaacttctaccgtgccctgatggatgaagaagacatggacgacgtggtggatgccgacgagtacctcatcccacagcagggcttcttcagcagcccctccacgtcacggactcccctcctgagctctctgagtgcaaccagcaacaattccaccgtggcttgcattgatagaaatgggctgcaaagctgtcccatcaaggaagacagcttcttgcagcgatacagctcagaccccacaggcgccttgactgaggacagcatagacgacaccttcctcccagtgcctgaatacataaaccagtccgttcccaaaaggcccgctggctctgtgcagaatcctgtctatcacaatcagcctctgaaccccgcgcccagcagagacccacactaccaggacccccacagcactgcagtgggcaaccccgagtatctcaacactgtccagcccacctgtgtcaacagcacattcgacagccctgcccactgggcccagaaaggcagccaccaaattagcctggacaaccctgactaccagcaggacttctttcccaaggaagccaagccaaatggcatctttaagggctccacagctgaaaatgcagaatacctaagggtcgcgccacaaagcagtgaatttattggagcatga

SEQ ID NO: 180 - DNA, 5589 bp, Homo sapiens
  misc_feature 1..5589: note = BRCA1
  source 1..5589: mol_type = genomic DNA
atggatttatctgctcttcgcgttgaagaagtacaaaatgtcattaatgctatgcagaaaatcttagagtgtcccatctgtctggagttgatcaaggaacctgtctccacaaagtgtgaccacatattttgcaaattttgcatgctgaaacttctcaaccagaagaaagggccttcacagtgtcctttatgtaagaatgatataaccaaaaggagcctacaagaaagtacgagatttagtcaacttgttgaagagctattgaaaatcatttgtgcttttcagcttgacacaggtttggagtatgcaaacagctataattttgcaaaaaaggaaaataactctcctgaacatctaaaagatgaagtttctatcatccaaagtatgggctacagaaaccgtgccaaaagacttctacagagtgaacccgaaaatccttccttgcaggaaaccagtctcagtgtccaactctctaaccttggaactgtgagaactctgaggacaaagcagcggatacaacctcaaaagacgtctgtctacattgaattgggatctgattcttctgaagataccgttaataaggcaacttattgcagtgtgggagatcaagaattgttacaaatcacccctcaaggaaccagggatgaaatcagtttggattctgcaaaaaaggctgcttgtgaattttctgagacggatgtaacaaatactgaacatcatcaacccagtaataatgatttgaacaccactgagaagcgtgcagctgagaggcatccagaaaagtatcagggtagttctgtttcaaacttgcatgtggagccatgtggcacaaatactcatgccagctcattacagcatgagaacagcagtttattactcactaaagacagaatgaatgtagaaaaggctgaattctgtaataaaagcaaacagcctggcttagcaaggagccaacataacagatgggctggaagtaaggaaacatgtaatgataggcggactcccagcacagaaaaaaaggtagatctgaatgctgatcccctgtgtgagagaaaagaatggaataagcagaaactgccatgctcagagaatcctagagatactgaagatgttccttggataacactaaatagcagcattcagaaagttaatgagtggttttccagaagtgatgaactgttaggttctgatgactcacatgatggggagtctgaatcaaatgccaaagtagctgatgtattggacgttctaaatgaggtagatgaatattctggttcttcagagaaaatagacttactggccagtgatcctcatgaggctttaatatgtaaaagtgaaagagttcactccaaatcagtagagagtaatattgaagacaaaatatttgggaaaacctatcggaagaaggcaagcctccccaacttaagccatgtaactgaaaatctaattataggagcatttgttactgagccacagataatacaagagcgtcccctcacaaataaattaaagcgtaaaaggagacctacatcaggccttcatcctgaggattttatcaagaaagcagatttggcagttcaaaagactcctgaaatgataaatcagggaactaaccaaacggagcagaatggtcaagtgatgaatattactaatagtggtcatgagaataaaacaaaaggtgattctattcagaatgagaaaaatcctaacccaatagaatcactcgaaaaagaatctgctttcaaaacgaaagctgaacctataagcagcagtataagcaatatggaactcgaattaaatatccacaattcaaaagcacctaaaaagaataggctgaggaggaagtcttctaccaggcatattcatgcgcttgaactagtagtcagtagaaatctaagcccacctaattgtactgaattgcaaattgatagttgttctagcagtgaagagataaagaaaaaaaagtacaaccaaatgccagtcaggcacagcagaaacctacaactcatggaaggtaaagaacctgcaactggagccaagaagagtaacaagccaaatgaacagacaagtaaaagacatgacagcgatactttcccagagctgaagttaacaaatgcacctggttcttttactaagtgttcaaataccagtgaacttaaagaatttgtcaatcctagccttccaagagaagaaaaagaagagaaactagaaacagttaaagtgtctaataatgctgaagaccccaaagatctcatgttaagtggagaaagggttttgcaaactgaaagatctgtagagagtagcagtatttcattggtacctggtactgattatggcactcaggaaagtatctcgttactggaagttagcactctagggaaggcaaaaacagaaccaaataaatgtgtgagtcagtgtgcagcatttgaaaaccccaagggactaattcatggttgttccaaagataatagaaatgacacagaaggctttaagtatccattgggacatgaagttaaccacagtcgggaaacaagcatagaaatggaagaaagtgaacttgatgctcagtatttgcagaatacattcaaggtttcaaagcgccagtcatttgctccgttttcaaatccaggaaatgcagaagaggaatgtgcaacattctctgcccactctgggtccttaaagaaacaaagtccaaaagtcacttttgaatgtgaacaaaaggaagaaaatcaaggaaagaatgagtctaatatcaagcctgtacagacagttaatatcactgcaggctttcctgtggttggtcagaaagataagccagttgataatgccaaatgtagtatcaaaggaggctctaggttttgtctatcatctcagttcagaggcaacgaaactggactcattactccaaataaacatggacttttacaaaacccatatcgtataccaccactttttcccatcaagtcatttgttaaaactaaatgtaagaaaaatctgctagaggaaaactttgaggaacattcaatgtcacctgaaagagaaatgggaaatgagaacattccaagtacagtgagcacaattagccgtaataacattagagaaaatgtttttaaagaagccagctcaagcaatattaatgaagtaggttccagtactaatgaagtgggctccagtattaatgaaataggttccagtgatgaaaacattcaagcagaactaggtagaaacagagggccaaaattgaatgctatgcttagattaggggttttgcaacctgaggtctataaacaaagtcttcctggaagtaattgtaagcatcctgaaataaaaaagcaagaatatgaagaagtagttcagactgttaatacagatttctctccatatctgatttcagataacttagaacagcctatgggaagtagtcatgcatctcaggtttgttctgagacacctgatgacctgttagatgatggtgaaataaaggaagatactagttttgctgaaaatgacattaaggaaagttctgctgtttttagcaaaagcgtccagaaaggagagcttagcaggagtcctagccctttcacccatacacatttggctcagggttaccgaagaggggccaagaaattagagtcctcagaagagaacttatctagtgaggatgaagagcttccctgcttccaacacttgttatttggtaaagtaaacaatataccttctcagtctactaggcatagcaccgttgctaccgagtgtctgtctaagaacacagaggagaatttattatcattgaagaatagcttaaatgactgcagtaaccaggtaatattggcaaaggcatctcaggaacatcaccttagtgaggaaacaaaatgttctgctagcttgttttcttcacagtgcagtgaattggaagacttgactgcaaatacaaacacccaggatcctttcttgattggttcttccaaacaaatgaggcatcagtctgaaagccagggagttggtctgagtgacaaggaattggtttcagatgatgaagaaagaggaacgggcttggaagaaaataatcaagaagagcaaagcatggattcaaacttaggtgaagcagcatctgggtgtgagagtgaaacaagcgtctctgaagactgctcagggctatcctctcagagtgacattttaaccactcagcagagggataccatgcaacataacctgataaagctccagcaggaaatggctgaactagaagctgtgttagaacagcatgggagccagccttctaacagctacccttccatcataagtgactcttctgcccttgaggacctgcgaaatccagaacaaagcacatcagaaaaagcagtattaacttcacagaaaagtagtgaataccctataagccagaatccagaaggcctttctgctgacaagtttgaggtgtctgcagatagttctaccagtaaaaataaagaaccaggagtggaaaggtcatccccttctaaatgcccatcattagatgataggtggtacatgcacagttgctctgggagtcttcagaatagaaactacccatctcaagaggagctcattaaggttgttgatgtggaggagcaacagctggaagagtctgggccacacgatttgacggaaacatcttacttgccaaggcaagatctagagggaaccccttacctggaatctggaatcagcctcttctctgatgaccctgaatctgatccttctgaagacagagccccagagtcagctcgtgttggcaacataccatcttcaacctctgcattgaaagttccccaattgaaagttgcagaatctgcccagagtccagctgctgctcatactactgatactgctgggtataatgcaatggaagaaagtgtgagcagggagaagccagaattgacagcttcaacagaaagggtcaacaaaagaatgtccatggtggtgtctggcctgaccccagaagaatttatgctcgtgtacaagtttgccagaaaacaccacatcactttaactaatctaattactgaagagactactcatgttgttatgaaaacagatgctgagtttgtgtgtgaacggacactgaaatattttctaggaattgcgggaggaaaatgggtagttagctatttctgggtgacccagtctattaaagaaagaaaaatgctgaatgagcatgattttgaagtcagaggagatgtggtcaatggaagaaaccaccaaggtccaaagcgagcaagagaatcccaggacagaaagatcttcagggggctagaaatctgttgctatgggcccttcaccaacatgcccacagatcaactggaatggatggtacagctgtgtggtgcttctgtggtgaaggagctttcatcattcacccttggcacaggtgtccacccaattgtggttgtgcagccagatgcctggacagaggacaatggcttccatgcaattgggcagatgtgtgaggcacctgtggtgacccgagagtgggtgttggacagtgtagcactctaccagtgccaggagctggacacctacctgataccccagatcccccacagccactac

SEQ ID NO: 181 - DNA, 10254 bp, Homo sapiens
  misc_feature 1..10254: note = BRCA2
  source 1..10254: mol_type = genomic DNA
atgcctattggatccaaagagaggccaacattttttgaaatttttaagacacgctgcaacaaagcagatttaggaccaataagtcttaattggtttgaagaactttcttcagaagctccaccctataattctgaacctgcagaagaatctgaacataaaaacaacaattacgaaccaaacctatttaaaactccacaaaggaaaccatcttataatcagctggcttcaactccaataatattcaaagagcaagggctgactctgccgctgtaccaatctcctgtaaaagaattagataaattcaaattagacttaggaaggaatgttcccaatagtagacataaaagtcttcgcacagtgaaaactaaaatggatcaagcagatgatgtttcctgtccacttctaaattcttgtcttagtgaaagtcctgttgttctacaatgtacacatgtaacaccacaaagagataagtcagtggtatgtgggagtttgtttcatacaccaaagtttgtgaagggtcgtcagacaccaaaacatatttctgaaagtctaggagctgaggtggatcctgatatgtcttggtcaagttctttagctacaccacccacccttagttctactgtgctcatagtcagaaatgaagaagcatctgaaactgtatttcctcatgatactactgctaatgtgaaaagctatttttccaatcatgatgaaagtctgaagaaaaatgatagatttatcgcttctgtgacagacagtgaaaacacaaatcaaagagaagctgcaagtcatggatttggaaaaacatcagggaattcatttaaagtaaatagctgcaaagaccacattggaaagtcaatgccaaatgtcctagaagatgaagtatatgaaacagttgtagatacctctgaagaagatagtttttcattatgtttttctaaatgtagaacaaaaaatctacaaaaagtaagaactagcaagactaggaaaaaaattttccatgaagcaaacgctgatgaatgtgaaaaatctaaaaaccaagtgaaagaaaaatactcatttgtatctgaagtggaaccaaatgatactgatccattagattcaaatgtagcaaatcagaagccctttgagagtggaagtgacaaaatctccaaggaagttgtaccgtctttggcctgtgaatggtctcaactaaccctttcaggtctaaatggagcccagatggagaaaatacccctattgcatatttcttcatgtgaccaaaatatttcagaaaaagacctattagacacagagaacaaaagaaagaaagattttcttacttcagagaattctttgccacgtatttctagcctaccaaaatcagagaagccattaaatgaggaaacagtggtaaataagagagatgaagagcagcatcttgaatctcatacagactgcattcttgcagtaaagcaggcaatatctggaacttctccagtggcttcttcatttcagggtatcaaaaagtctatattcagaataagagaatcacctaaagagactttcaatgcaagtttttcaggtcatatgactgatccaaactttaaaaaagaaactgaagcctctgaaagtggactggaaatacatactgtttgctcacagaaggaggactccttatgtccaaatttaattgataatggaagctggccagccaccaccacacagaattctgtagctttgaagaatgcaggtttaatatccactttgaaaaagaaaacaaataagtttatttatgctatacatgatgaaacatcttataaaggaaaaaaaataccgaaagaccaaaaatcagaactaattaactgttcagcccagtttgaagcaaatgcttttgaagcaccacttacatttgcaaatgctgattcaggtttattgcattcttctgtgaaaagaagctgttcacagaatgattctgaagaaccaactttgtccttaactagctcttttgggacaattctgaggaaatgttctagaaatgaaacatgttctaataatacagtaatctctcaggatcttgattataaagaagcaaaatgtaataaggaaaaactacagttatttattaccccagaagctgattctctgtcatgcctgcaggaaggacagtgtgaaaatgatccaaaaagcaaaaaagtttcagatataaaagaagaggtcttggctgcagcatgtcacccagtacaacattcaaaagtggaatacagtgatactgactttcaatcccagaaaagtcttttatatgatcatgaaaatgccagcactcttattttaactcctacttccaaggatgttctgtcaaacctagtcatgatttctagaggcaaagaatcatacaaaatgtcagacaagctcaaaggtaacaattatgaatctgatgttgaattaaccaaaaatattcccatggaaaagaatcaagatgtatgtgctttaaatgaaaattataaaaacgttgagctgttgccacctgaaaaatacatgagagtagcatcaccttcaagaaaggtacaattcaaccaaaacacaaatctaagagtaatccaaaaaaatcaagaagaaactacttcaatttcaaaaataactgtcaatccagactctgaagaacttttctcagacaatgagaataattttgtcttccaagtagctaatgaaaggaataatcttgctttaggaaatactaaggaacttcatgaaacagacttgacttgtgtaaacgaacccattttcaagaactctaccatggttttatatggagacacaggtgataaacaagcaacccaagtgtcaattaaaaaagatttggtttatgttcttgcagaggagaacaaaaatagtgtaaagcagcatataaaaatgactctaggtcaagatttaaaatcggacatctccttgaatatagataaaataccagaaaaaaataatgattacatgaacaaatgggcaggactcttaggtccaatttcaaatcacagttttggaggtagcttcagaacagcttcaaataaggaaatcaagctctctgaacataacattaagaagagcaaaatgttcttcaaagatattgaagaacaatatcctactagtttagcttgtgttgaaattgtaaataccttggcattagataatcaaaagaaactgagcaagcctcagtcaattaatactgtatctgcacatttacagagtagtgtagttgtttctgattgtaaaaatagtcatataacccctcagatgttattttccaagcaggattttaattcaaaccataatttaacacctagccaaaaggcagaaattacagaactttctactatattagaagaatcaggaagtcagtttgaatttactcagtttagaaaaccaagctacatattgcagaagagtacatttgaagtgcctgaaaaccagatgactatcttaaagaccacttctgaggaatgcagagatgctgatcttcatgtcataatgaatgccccatcgattggtcaggtagacagcagcaagcaatttgaaggtacagttgaaattaaacggaagtttgctggcctgttgaaaaatgactgtaacaaaagtgcttctggttatttaacagatgaaaatgaagtggggtttaggggcttttattctgctcatggcacaaaactgaatgtttctactgaagctctgcaaaaagctgtgaaactgtttagtgatattgagaatattagtgaggaaacttctgcagaggtacatccaataagtttatcttcaagtaaatgtcatgattctgttgtttcaatgtttaagatagaaaatcataatgataaaactgtaagtgaaaaaaataataaatgccaactgatattacaaaataatattgaaatgactactggcacttttgttgaagaaattactgaaaattacaagagaaatactgaaaatgaagataacaaatatactgctgccagtagaaattctcataacttagaatttgatggcagtgattcaagtaaaaatgatactgtttgtattcataaagatgaaacggacttgctatttactgatcagcacaacatatgtcttaaattatctggccagtttatgaaggagggaaacactcagattaaagaagatttgtcagatttaacttttttggaagttgcgaaagctcaagaagcatgtcatggtaatacttcaaataaagaacagttaactgctactaaaacggagcaaaatataaaagattttgagacttctgatacattttttcagactgcaagtgggaaaaatattagtgtcgccaaagagtcatttaataaaattgtaaatttctttgatcagaaaccagaagaattgcataacttttccttaaattctgaattacattctgacataagaaagaacaaaatggacattctaagttatgaggaaacagacatagttaaacacaaaatactgaaagaaagtgtcccagttggtactggaaatcaactagtgaccttccagggacaacccgaacgtgatgaaaagatcaaagaacctactctattgggttttcatacagctagcgggaaaaaagttaaaattgcaaaggaatctttggacaaagtgaaaaacctttttgatgaaaaagagcaaggtactagtgaaatcaccagttttagccatcaatgggcaaagaccctaaagtacagagaggcctgtaaagaccttgaattagcatgtgagaccattgagatcacagctgccccaaagtgtaaagaaatgcagaattctctcaataatgataaaaaccttgtttctattgagactgtggtgccacctaagctcttaagtgataatttatgtagacaaactgaaaatctcaaaacatcaaaaagtatctttttgaaagttaaagtacatgaaaatgtagaaaaagaaacagcaaaaagtcctgcaacttgttacacaaatcagtccccttattcagtcattgaaaattcagccttagctttttacacaagttgtagtagaaaaacttctgtgagtcagacttcattacttgaagcaaaaaaatggcttagagaaggaatatttgatggtcaaccagaaagaataaatactgcagattatgtaggaaattatttgtatgaaaataattcaaacagtactatagctgaaaatgacaaaaatcatctctccgaaaaacaagatacttatttaagtaacagtagcatgtctaacagctattcctaccattctgatgaggtatataatgattcaggatatctctcaaaaaataaacttgattctggtattgagccagtattgaagaatgttgaagatcaaaaaaacactagtttttccaaagtaatatccaatgtaaaagatgcaaatgcatacccacaaactgtaaatgaagatatttgcgttgaggaacttgtgactagctcttcaccctgcaaaaataaaaatgcagccattaaattgtccatatctaatagtaataattttgaggtagggccacctgcatttaggatagccagtggtaaaatcgtttgtgtttcacatgaaacaattaaaaaagtgaaagacatatttacagacagtttcagtaaagtaattaaggaaaacaacgagaataaatcaaaaatttgccaaacgaaaattatggcaggttgttacgaggcattggatgattcagaggatattcttcataactctctagataatgatgaatgtagcacgcattcacataaggtttttgctgacattcagagtgaagaaattttacaacataaccaaaatatgtctggattggagaaagtttctaaaatatcaccttgtgatgttagtttggaaacttcagatatatgtaaatgtagtatagggaagcttcataagtcagtctcatctgcaaatacttgtgggatttttagcacagcaagtggaaaatctgtccaggtatcagatgcttcattacaaaacgcaagacaagtgttttctgaaatagaagatagtaccaagcaagtcttttccaaagtattgtttaaaagtaacgaacattcagaccagctcacaagagaagaaaatactgctatacgtactccagaacatttaatatcccaaaaaggcttttcatataatgtggtaaattcatctgctttctctggatttagtacagcaagtggaaagcaagtttccattttagaaagttccttacacaaagttaagggagtgttagaggaatttgatttaatcagaactgagcatagtcttcactattcacctacgtctagacaaaatgtatcaaaaatacttcctcgtgttgataagagaaacccagagcactgtgtaaactcagaaatggaaaaaacctgcagtaaagaatttaaattatcaaataacttaaatgttgaaggtggttcttcagaaaataatcactctattaaagtttctccatatctctctcaatttcaacaagacaaacaacagttggtattaggaaccaaagtgtcacttgttgagaacattcatgttttgggaaaagaacaggcttcacctaaaaacgtaaaaatggaaattggtaaaactgaaactttttctgatgttcctgtgaaaacaaatatagaagtttgttctacttactccaaagattcagaaaactactttgaaacagaagcagtagaaattgctaaagcttttatggaagatgatgaactgacagattctaaactgccaagtcatgccacacattctctttttacatgtcccgaaaatgaggaaatggttttgtcaaattcaagaattggaaaaagaagaggagagccccttatcttagtgggagaaccctcaatcaaaagaaacttattaaatgaatttgacaggataatagaaaatcaagaaaaatccttaaaggcttcaaaaagcactccagatggcacaataaaagatcgaagattgtttatgcatcatgtttctttagagccgattacctgtgtaccctttcgcacaactaaggaacgtcaagagatacagaatccaaattttaccgcacctggtcaagaatttctgtctaaatctcatttgtatgaacatctgactttggaaaaatcttcaagcaatttagcagtttcaggacatccattttatcaagtttctgctacaagaaatgaaaaaatgagacacttgattactacaggcagaccaaccaaagtctttgttccaccttttaaaactaaatcacattttcacagagttgaacagtgtgttaggaatattaacttggaggaaaacagacaaaagcaaaacattgatggacatggctctgatgatagtaaaaataagattaatgacaatgagattcatcagtttaacaaaaacaactccaatcaagcagcagctgtaactttcacaaagtgtgaagaagaacctttagatttaattacaagtcttcagaatgccagagatatacaggatatgcgaattaagaagaaacaaaggcaacgcgtctttccacagccaggcagtctgtatcttgcaaaaacatccactctgcctcgaatctctctgaaagcagcagtaggaggccaagttccctctgcgtgttctcataaacagctgtatacgtatggcgtttctaaacattgcataaaaattaacagcaaaaatgcagagtcttttcagtttcacactgaagattattttggtaaggaaagtttatggactggaaaaggaatacagttggctgatggtggatggctcataccctccaatgatggaaaggctggaaaagaagaattttatagggctctgtgtgacactccaggtgtggatccaaagcttatttctagaatttgggtttataatcactatagatggatcatatggaaactggcagctatggaatgtgcctttcctaaggaatttgctaatagatgcctaagcccagaaagggtgcttcttcaactaaaatacagatatgatacggaaattgatagaagcagaagatcggctataaaaaagataatggaaagggatgacacagctgcaaaaacacttgttctctgtgtttctgacataatttcattgagcgcaaatatatctgaaacttctagcaataaaactagtagtgcagatacccaaaaagtggccattattgaacttacagatgggtggtatgctgttaaggcccagttagatcctcccctcttagctgtcttaaagaatggcagactgacagttggtcagaagattattcttcatggagcagaactggtgggctctcctgatgcctgtacacctcttgaagccccagaatctcttatgttaaagatttctgctaacagtactcggcctgctcgctggtataccaaacttggattctttcctgaccctagaccttttcctctgcccttatcatcgcttttcagtgatggaggaaatgttggttgtgttgatgtaattattcaaagagcataccctatacagtggatggagaagacatcatctggattatacatatttcgcaatgaaagagaggaagaaaaggaagcagcaaaatatgtggaggcccaacaaaagagactagaagccttattcactaaaattcaggaggaatttgaagaacatgaagaaaacacaacaaaaccatatttaccatcacgtgcactaacaagacagcaagttcgtgctttgcaagatggtgcagagctttatgaagcagtgaagaatgcagcagacccagcttaccttgagggttatttcagtgaagagcagttaagagccttgaataatcacaggcaaatgttgaatgataagaaacaagctcagatccagttggaaattaggaaggccatggaatctgctgaacaaaaggaacaaggtttatcaagggatgtcacaaccgtgtggaagttgcgtattgtaagctattcaaaaaaagaaaaagattcagttatactgagtatttggcgtccatcatcagatttatattctctgttaacagaaggaaagagatacagaatttatcatcttgcaacttcaaaatctaaaagtaaatctgaaagagctaacatacagttagcagcgacaaaaaaaactcagtatcaacaactaccggtttcagatgaaattttatttcagatttaccagccacgggagccccttcacttcagcaaatttttagatccagactttcagccatcttgttctgaggtggacctaataggatttgtcgtttctgttgtgaaaaaaacaggacttgcccctttcgtctatttgtcagacgaatgttacaatttactggcaataaagttttggatagaccttaatgaggacattattaagcctcatatgttaattgctgcaagcaacctccagtggcgaccagaatccaaatcaggccttcttactttatttgctggagatttttctgtgttttctgctagtccaaaagagggccactttcaagagacattcaacaaaatgaaaaatactgttgagaatattgacatactttgcaatgaagcagaaaacaagcttatgcatatactgcatgcaaatgatcccaagtggtccaccccaactaaagactgtacttcagggccgtacactgctcaaatcattcctggtacaggaaacaagcttctgatgtcttctcctaattgtgagatatattatcaaagtcctttatcactttgtatggccaaaaggaagtctgtttccacacctgtctcagcccagatgacttcaaagtcttgtaaaggggagaaagagattgatgaccaaaagaactgcaaaaagagaagagccttggatttcttgagtagactgcctttacctccacctgttagtcccatttgtacatttgtttctccggctgcacagaaggcatttcagccaccaaggagttgtggcaccaaatacgaaacacccataaagaaaaaagaactgaattctcctcagatgactccatttaaaaaattcaatgaaatttctcttttggaaagtaattcaatagctgacgaagaacttgcattgataaatacccaagctcttttgtctggttcaacaggagaaaaacaatttatatctgtcagtgaatccactaggactgctcccaccagttcagaagattatctcagactgaaacgacgttgtactacatctctgatcaaagaacaggagagttcccaggccagtacggaagaatgtgagaaaaataagcaggacacaattacaactaaaaaatatatc

SEQ ID NO: 182 - DNA, 2487 bp, Homo sapiens
  misc_feature 1..2487: note = MCC
  source 1..2487: mol_type = genomic DNA
atgaattccggagttgccatgaaatatggaaacgactcctcggccgagctgagtgagctccattcagcagccctggcatcactaaagggagatatagtggaacttaataaacgtctccagcaaacagagagggaacgggaccttctggaaaagaaattggccaaggcacagtgcgagcagtcccacctcatgagagagcatgaggatgtccaggagcgaacgacgcttcgctatgaggaacgcatcacagagctccacagcgtcattgcggagctcaacaagaagatagaccgtctgcaaggcaccaccatcagggaggaagatgagtactcagaactgcgatcagaactcagccagagccaacacgaggtcaacgaggactctcgaagcatggaccaagaccagacctctgtctctatccccgaaaaccagtctaccatggttactgctgacatggacaactgcagtgacctgaactcagaactgcagagggtgctgacagggctggagaatgttgtctgcggcaggaagaagagcagctgcagcctctccgtggccgaggtggacaggcacattgagcagctcaccacagccagcgagcactgtgacctggctattaagacagtcgaggagattgagggggtgcttggccgggacctgtatcccaacctggctgaagagaggtctcggtgggagaaggagctggctgggctgagggaagagaatgagagcctgactgccatgctgtgcagcaaagaggaagaactgaaccggactaaggccaccatgaatgccatccgggaagagcgggaccggctccggaggcgggtcagagagcttcaaactcgactacagagcgtgcaggccacaggtccctccagccctggccgcctcacttccaccaaccgcccgattaaccccagcactggggagctgagcacaagcagcagcagcaatgacattcccatcgccaagattgctgagagggtgaagctatcaaagacaaggtccgaatcgtcatcatctgatcggccagtcctgggctcagaaatcagtagcataggggtatccagcagtgtggctgaacacctggcccactcacttcaggactgctccaatatccaagagattttccaaacactctactcacacggatctgccatctcagaaagcaagattagagagtttgaggtggaaacagaacggctgaatagccggattgagcacctcaaatcccaaaatgacctcctgaccataaccttggaggaatgtaaaagcaatgctgagaggatgagcatgctggtgggaaaatacgaatccaatgccacagcgctgaggctggccttgcagtacagcgagcagtgcatcgaagcctacgaactcctcctggcgctggcagagagtgagcagagcctcatcctggggcagttccgagcggcgggcgtggggtcctcccctggagaccagtcgggggatgaaaacatcactcagatgctcaagcgagctcatgactgccggaagacagctgagaacgctgccaaggccctgctcatgaagctggacggcagctgtgggggagcctttgccgtggccggctgcagcgtgcagccctgggagagcctttcctccaacagccacaccagcacaaccagctccacagccagtagttgcgacaccgagttcactaaagaagacgagcagaggctgaaggattatatccagcagctcaagaatgacagggctgcggtcaagctgaccatgctggagctggaaagcatccacatcgatcctctcagctatgacgtcaagcctcggggagacagccagaggctggatctggaaaacgcagtgcttatgcaggagctcatggccatgaaggaggagatggccgagttgaaggcccagctctacctactggagaaagagaagaaggccctggagctgaagctgagcacgcgggaggcccaggagcaggcctacctggtgcacattgagcacctgaagtccgaggtggaggagcagaaggagcagcggatgcgatccctcagctccaccagcagcggcagcaaagataaacctggcaaggagtgtgctgatgctgcctccccagctctgtccctagctgaactcaggacaacgtgcagcgagaatgagctggctgcggagttcaccaacgccattcgtcgagaaaagaagttgaaggccagagttcaagagctggtgagtgccttggagagactcaccaagagcagtgaaatccgacatcagcaatctgcagagttcgtgaatgatctaaagcgggccaacagcaacctggtggctgcctatgagaaagcaaagaaaaagcatcaaaacaaactgaagaagttagagtcgcagatgatggccatggtggagagacatgagacccaagtgaggatgctcaagcaaagaatagctctgctagaggaggagaactccaggccacacaccaatgaaacttcgctt

SEQ ID NO: 183 - DNA, 2253 bp, Homo sapiens
  misc_feature 1..2253: note = EZH2, isoform 1
  source 1..2253: mol_type = genomic DNA
atgggccagactgggaagaaatctgagaagggaccagtttgttggcggaagcgtgtaaaatcagagtacatgcgactgagacagctcaagaggttcagacgagctgatgaagtaaagagtatgtttagttccaatcgtcagaaaattttggaaagaacggaaatcttaaaccaagaatggaaacagcgaaggatacagcctgtgcacatcctgacttctgtgagctcattgcgcgggactagggagtgttcggtgaccagtgacttggattttccaacacaagtcatcccattaaagactctgaatgcagttgcttcagtacccataatgtattcttggtctcccctacagcagaattttatggtggaagatgaaactgttttacataacattccttatatgggagatgaagttttagatcaggatggtactttcattgaagaactaataaaaaattatgatgggaaagtacacggggatagagaatgtgggtttataaatgatgaaatttttgtggagttggtgaatgcccttggtcaatataatgatgatgacgatgatgatgatggagacgatcctgaagaaagagaagaaaagcagaaagatctggaggatcaccgagatgataaagaaagccgcccacctcggaaatttccttctgataaaatttttgaagccatttcctcaatgtttccagataagggcacagcagaagaactaaaggaaaaatataaagaactcaccgaacagcagctcccaggcgcacttcctcctgaatgtacccccaacatagatggaccaaatgctaaatctgttcagagagagcaaagcttacactcctttcatacgcttttctgtaggcgatgttttaaatatgactgcttcctacatcgtaagtgcaattattcttttcatgcaacacccaacacttataagcggaagaacacagaaacagctctagacaacaaaccttgtggaccacagtgttaccagcatttggagggagcaaaggagtttgctgctgctctcaccgctgagcggataaagaccccaccaaaacgtccaggaggccgcagaagaggacggcttcccaataacagtagcaggcccagcacccccaccattaatgtgctggaatcaaaggatacagacagtgatagggaagcagggactgaaacggggggagagaacaatgataaagaagaagaagagaagaaagatgaaacttcgagctcctctgaagcaaattctcggtgtcaaacaccaataaagatgaagccaaatattgaacctcctgagaatgtggagtggagtggtgctgaagcctcaatgtttagagtcctcattggcacttactatgacaatttctgtgccattgctaggttaattgggaccaaaacatgtagacaggtgtatgagtttagagtcaaagaatctagcatcatagctccagctcccgctgaggatgtggatactcctccaaggaaaaagaagaggaaacaccggttgtgggctgcacactgcagaaagatacagctgaaaaaggacggctcctctaaccatgtttacaactatcaaccctgtgatcatccacggcagccttgtgacagttcgtgcccttgtgtgatagcacaaaatttttgtgaaaagttttgtcaatgtagttcagagtgtcaaaaccgctttccgggatgccgctgcaaagcacagtgcaacaccaagcagtgcccgtgctacctggctgtccgagagtgtgaccctgacctctgtcttacttgtggagccgctgaccattgggacagtaaaaatgtgtcctgcaagaactgcagtattcagcggggctccaaaaagcatctattgctggcaccatctgacgtggcaggctgggggatttttatcaaagatcctgtgcagaaaaatgaattcatctcagaatactgtggagagattatttctcaagatgaagctgacagaagagggaaagtgtatgataaatacatgtgcagctttctgttcaacttgaacaatgattttgtggtggatgcaacccgcaagggtaacaaaattcgttttgcaaatcattcggtaaatccaaactgctatgcaaaagttatgatggttaacggtgatcacaggataggtatttttgccaagagagccatccagactggcgaagagctgttttttgattacagatacagccaggctgatgccctgaagtatgtcggcatcgaaagagaaatggaaatccct

SEQ ID NO: 184 - DNA, 1053 bp, Homo sapiens
  misc_feature 1..1053: note = NIPP1/PPP1R8, isoform alpha
  source 1..1053: mol_type = genomic DNA
atggcggcagccgcgaactccggctctagcctcccgctgttcgactgcccaacctgggcaggtaagccccctcccggtttacatctggatgtagtcaaaggagacaaactaattgagaaactgattattgatgagaagaagtattacttatttgggagaaaccctgatttgtgtgactttaccattgaccaccagtcttgctctcgggtccatgctgcacttgtctaccacaagcatctgaagagagttttcctgatagatctcaacagtacacacggcactttcttgggtcacattcggttggaacctcacaagcctcagcaaattcccatcgattccacggtctcatttggcgcatccacaagggcatacactctgcgcgagaagcctcagacattgccatcggctgtgaaaggagatgagaagatgggtggagaggatgatgaactcaagggcttactggggcttccagaggaggaaactgagcttgataacctgacagagttcaacactgcccacaacaagcggatttctacccttaccattgaggagggaaatctggacattcaaagaccaaagaggaagaggaagaactcacgggtgacattcagtgaggatgatgagatcatcaacccagaggatgtggatccctcagttggtcgattcaggaacatggtgcaaactgcagtggtcccagtcaagaagaagcgtgtggagggccctggctccctgggcctggaggaatcagggagcaggcgcatgcagaactttgccttcagcggaggactctacgggggcctgccccccacacacagtgaagcaggctcccagccacatggcatccatgggacagcactcatcggtggcttgcccatgccatacccaaaccttgcccctgatgtggacttgactcctgttgtgccgtcagcagtgaacatgaaccctgcaccaaaccctgcagtctataaccctgaagctgtaaatgaacccaagaagaagaaatatgcaaaagaggcttggccaggcaagaagcccacaccttccttgctgatt

SEQ ID NO: 185 - DNA, 990 bp, Homo sapiens
  misc_feature 1..990: note = PPP1CA, isoform 1
  source 1..990: mol_type = genomic DNA
atgtccgacagcgagaagctcaacctggactcgatcatcgggcgcctgctggaagtgcagggctcgcggcctggcaagaatgtacagctgacagagaacgagatccgcggtctgtgcctgaaatcccgggagatttttctgagccagcccattcttctggagctggaggcacccctcaagatctgcggtgacatacacggccagtactacgaccttctgcgactatttgagtatggcggtttccctcccgagagcaactacctctttctgggggactatgtggacaggggcaagcagtccttggagaccatctgcctgctgctggcctataagatcaagtaccccgagaacttcttcctgctccgtgggaaccacgagtgtgccagcatcaaccgcatctatggtttctacgatgagtgcaagagacgctacaacatcaaactgtggaaaaccttcactgactgcttcaactgcctgcccatcgcggccatagtggacgaaaagatcttctgctgccacggaggcctgtccccggacctgcagtctatggagcagattcggcggatcatgcggcccacagatgtgcctgaccagggcctgctgtgtgacctgctgtggtctgaccctgacaaggacgtgcagggctggggcgagaacgaccgtggcgtctcttttacctttggagccgaggtggtggccaagttcctccacaagcacgacttggacctcatctgccgagcacaccaggtggtagaagacggctacgagttctttgccaagcggcagctggtgacacttttctcagctcccaactactgtggcgagtttgacaatgctggcgccatgatgagtgtggacgagaccctcatgtgctctttccagatcctcaagcccgccgacaagaacaaggggaagtacgggcagttcagtggcctgaaccctggaggccgacccatcaccccaccccgcaattccgccaaagccaagaaa

SEQ ID NO: 186 - DNA, 1818 bp, Homo sapiens
  misc_feature 1..1818: note = TAK1/MAP3K7, isoform 1B
  source 1..1818: mol_type = genomic DNA
atgtctacagcctctgccgcctcctcctcctcctcgtcttcggccggtgagatgatcgaagccccttcccaggtcctcaactttgaagagatcgactacaaggagatcgaggtggaagaggttgttggaagaggagcctttggagttgtttgcaaagctaagtggagagcaaaagatgttgctattaaacaaatagaaagtgaatctgagaggaaagcgtttattgtagagcttcggcagttatcccgtgtgaaccatcctaatattgtaaagctttatggagcctgcttgaatccagtgtgtcttgtgatggaatatgctgaagggggctctttatataatgtgctgcatggtgctgaaccattgccatattatactgctgcccacgcaatgagttggtgtttacagtgttcccaaggagtggcttatcttcacagcatgcaacccaaagcgctaattcacagggacctgaaaccaccaaacttactgctggttgcaggggggacagttctaaaaatttgtgattttggtacagcctgtgacattcagacacacatgaccaataacaaggggagtgctgcttggatggcacctgaagtttttgaaggtagtaattacagtgaaaaatgtgacgtcttcagctggggtattattctttgggaagtgataacgcgtcggaaaccctttgatgagattggtggcccagctttccgaatcatgtgggctgttcataatggtactcgaccaccactgataaaaaatttacctaagcccattgagagcctgatgactcgttgttggtctaaagatccttcccagcgcccttcaatggaggaaattgtgaaaataatgactcacttgatgcggtactttccaggagcagatgagccattacagtatccttgtcagtattcagatgaaggacagagcaactctgccaccagtacaggctcattcatggacattgcttctacaaatacgagtaacaaaagtgacactaatatggagcaagttcctgccacaaatgatactattaagcgcttagaatcaaaattgttgaaaaatcaggcaaagcaacagagtgaatctggacgtttaagcttgggagcctcccgtgggagcagtgtggagagcttgcccccaacctctgagggcaagaggatgagtgctgacatgtctgaaatagaagctaggatcgccgcaaccacagcctattccaagcctaaacggggccaccgtaaaactgcttcatttggcaacattctggatgtccctgagatcgtcatatcaggcaacggacagccaagacgtagatccatccaagacttgactgtaactggaacagaacctggtcaggtgagcagtaggtcatccagtcccagtgtcagaatgattactacctcaggaccaacctcagaaaagccaactcgaagtcatccatggacccctgatgattccacagataccaatggatcagataactccatcccaatggcttatcttacactggatcaccaactacagcctctagcaccgtgcccaaactccaaagaatctatggcagtgtttgaacagcattgtaaaatggcacaagaatatatgaaagttcaaacagaaattgcattgttattacagagaaagcaagaactagttgcagaactggaccaggatgaaaaggaccagcaaaatacatctcgcctggtacaggaacataaaaagcttttagatgaaaacaaaagcctttctacttactaccagcaatgcaaaaaacaactagaggtcatcagaagtcagcagcagaaacgacaaggcacttca

SEQ ID NO: 187 - DNA, 204 bp, unidentified
  misc_feature 1..204: note = CMV promoter
  source 1..204: mol_type = genomic DNA
gtgatgcggttttggcagtacatcaatgggcgtggatagcggtttgactcacggggatttccaagtctccaccccattgacgtcaatgggagtttgttttggcaccaaaatcaacgggactttccaaaatgtcgtaacaactccgccccattgacgcaaatgggcggtaggcgtgtacggtgggaggtctatataagcagagct

SEQ ID NO: 188 - DNA, 1212 bp, Homo sapiens
  misc_feature 1..1212: note = Caspase-1, isoform alpha
  source 1..1212: mol_type = genomic DNA
atggccgacaaggtcctgaaggagaagagaaagctgtttatccgttccatgggtgaaggtacaataaatggcttactggatgaattattacagacaagggtgctgaacaaggaagagatggagaaagtaaaacgtgaaaatgctacagttatggataagacccgagctttgattgactccgttattccgaaaggggcacaggcatgccaaatttgcatcacatacatttgtgaagaagacagttacctggcagggacgctgggactctcagcagatcaaacatctggaaattaccttaatatgcaagactctcaaggagtactttcttcctttccagctcctcaggcagtgcaggacaacccagctatgcccacatcctcaggctcagaagggaatgtcaagctttgctccctagaagaagctcaaaggatatggaaacaaaagtcggcagagatttatccaataatggacaagtcaagccgcacacgtcttgctctcattatctgcaatgaagaatttgacagtattcctagaagaactggagctgaggttgacatcacaggcatgacaatgctgctacaaaatctggggtacagcgtagatgtgaaaaaaaatctcactgcttcggacatgactacagagctggaggcatttgcacaccgcccagagcacaagacctctgacagcacgttcctggtgttcatgtctcatggtattcgggaaggcatttgtgggaagaaacactctgagcaagtcccagatatactacaactcaatgcaatctttaacatgttgaataccaagaactgcccaagtttgaaggacaaaccgaaggtgatcatcatccaggcctgccgtggtgacagccctggtgtggtgtggtttaaagattcagtaggagtttctggaaacctatctttaccaactacagaagagtttgaggatgatgctattaagaaagcccacatagagaaggattttatcgctttctgctcttccacaccagataatgtttcttggagacatcccacaatgggctctgtttttattggaagactcattgaacatatgcaagaatatgcctgttcctgtgatgtggaggaaattttccgcaaggttcgattttcatttgagcagccagatggtagagcgcagatgcccaccactgaaagagtgactttgacaagatgtttctacctcttcccaggacat

SEQ ID NO: 189 - DNA, 885 bp, Homo sapiens
  misc_feature 1..885: note = cyclin-D1/CCND1
  source 1..885: mol_type = genomic DNA
atggaacaccagctcctgtgctgcgaagtggaaaccatccgccgcgcgtaccccgatgccaacctcctcaacgaccgggtgctgcgggccatgctgaaggcggaggagacctgcgcgccctcggtgtcctacttcaaatgtgtgcagaaggaggtcctgccgtccatgcggaagatcgtcgccacctggatgctggaggtctgcgaggaacagaagtgcgaggaggaggtcttcccgctggccatgaactacctggaccgcttcctgtcgctggagcccgtgaaaaagagccgcctgcagctgctgggggccacttgcatgttcgtggcctctaagatgaaggagaccatccccctgacggccgagaagctgtgcatctacaccgacaactccatccggcccgaggagctgctgcaaatggagctgctcctggtgaacaagctcaagtggaacctggccgcaatgaccccgcacgatttcattgaacacttcctctccaaaatgccagaggcggaggagaacaaacagatcatccgcaaacacgcgcagaccttcgttgccctctgtgccacagatgtgaagttcatttccaatccgccctccatggtggcagcggggagcgtggtggccgcagtgcaaggcctgaacctgaggagccccaacaacttcctgtcctactaccgcctcacacgcttcctctccagagtgatcaagtgtgacccggactgcctccgggcctgccaggagcagatcgaagccctgctggagtcaagcctgcgccaggcccagcagaacatggaccccaaggccgccgaggaggaggaagaggaggaggaggaggtggacctggcttgcacacccaccgacgtgcgggacgtggacatc

SEQ ID NO: 190 - DNA, 996 bp, Homo sapiens
  misc_feature 1..996: note = A2b receptor (ADORA2B)
  source 1..996: mol_type = genomic DNA
atgctgctggagacacaggacgcgctgtacgtggcgctggagctggtcatcgccgcgctttcggtggcgggcaacgtgctggtgtgcgccgcggtgggcacggcgaacactctgcagacgcccaccaactacttcctggtgtccctggctgcggccgacgtggccgtggggctcttcgccatcccctttgccatcaccatcagcctgggcttctgcactgacttctacggctgcctcttcctcgcctgcttcgtgctggtgctcacgcagagctccatcttcagccttctggccgtggcagtcgacagatacctggccatctgtgtcccgctcaggtataaaagtttggtcacggggacccgagcaagaggggtcattgctgtcctctgggtccttgcctttggcatcggattgactccattcctggggtggaacagtaaagacagtgccaccaacaactgcacagaaccctgggatggaaccacgaatgaaagctgctgccttgtgaagtgtctctttgagaatgtggtccccatgagctacatggtatatttcaatttctttgggtgtgttctgcccccactgcttataatgctggtgatctacattaagatcttcctggtggcctgcaggcagcttcagcgcactgagctgatggaccactcgaggaccaccctccagcgggagatccatgcagccaagtcactggccatgattgtggggatttttgccctgtgctggttacctgtgcatgctgttaactgtgtcactcttttccagccagctcagggtaaaaataagcccaagtgggcaatgaatatggccattcttctgtcacatgccaattcagttgtcaatcccattgtctatgcttaccggaaccgagacttccgctacacttttcacaaaattatctccaggtatcttctctgccaagcagatgtcaagagtgggaatggtcaggctggggtacagcctgctctcggtgtgggccta

SEQ ID NO: 191 - DNA, 1242 bp, Homo sapiens
  misc_feature 1..1242: note = HHLA2, isoform 1
  source 1..1242: mol_type = genomic DNA
atgaaggcacagacagcactgtctttcttcctcattctcataacatctctgagtggatctcaaggcatattccctttggctttcttcatttatgttcctatgaatgaacaaatcgtcattggaagacttgatgaagatataattctcccttcttcatttgagaggggatccgaagtcgtaatacactggaagtatcaagatagctataaggttcacagttactacaaaggcagtgaccatttggaaagccaagatcccagatatgcaaacaggacatcccttttctataatgagattcaaaatgggaatgcgtcgctatttttcagaagagtaagccttctggacgaaggaatttacacctgctatgtaggaacagcaattcaagtgattacaaacaaagtggtgctaaaggtgggagtttttctcacacccgtgatgaagtatgaaaagaggaacacaaacagcttcttaatatgcagcgtgttaagtgtttatcctcgtccaattatcacgtggaaaatggacaacacacctatctctgaaaacaacatggaagaaacagggtctttggattctttttctattaacagcccactgaatattacaggatcaaattcatcttatgaatgtacaattgaaaattcactgctgaagcaaacatggacagggcgctggacgatgaaagatggccttcataaaatgcaaagtgaacacgtttcactctcatgtcaacctgtaaatgattatttttcaccaaaccaagacttcaaagttacttggtccagaatgaaaagtgggactttctctgtcctggcttactatctgagctcctcacaaaatacaattatcaatgaatcccgattctcatggaacaaagagctgataaaccagagtgacttctctatgaatttgatggatcttaatctttcagacagtggggaatatttatgcaatatttcttcggatgaatatactttacttaccatccacacagtgcatgtagaaccgagccaagaaacagcttcccataacaaaggcttatggattttggtgccctctgcgattttggcagcttttctgctgatttggagcgtaaaatgttgcagagcccagctagaagccaggaggagcagacaccctgctgatggagcccaacaagaaagatgttgtgtccctcctggtgagcgctgtcccagtgcacccgataatggcgaagaaaatgtgcctctttcaggaaaagta

SEQ ID NO: 192 - DNA, 1128 bp, Herpes simplex
  misc_feature 1..1128: note = herpes simplex virus thymidine kinase (HSV-TK)
  source 1..1128: mol_type = genomic DNA
atggcttcgtacccctgccatcaacacgcgtctgcgttcgaccaggctgcgcgttctcgcggccatagcaaccgacgtacggcgttgcgccctcgccggcagcaagaagccacggaagtccgcctggagcagaaaatgcccacgctactgcgggtttatatagacggtcctcacgggatggggaaaaccaccaccacgcaactgctggtggccctgggttcgcgcgacgatatcgtctacgtacccgagccgatgacttactggcaggtgctgggggcttccgagacaatcgcgaacatctacaccacacaacaccgcctcgaccagggtgagatatcggccggggacgcggcggtggtaatgacaagcgcccagataacaatgggcatgccttatgccgtgaccgacgccgttctggctcctcatgtcgggggggaggctgggagttcacatgccccgcccccggccctcaccctcatcttcgaccgccatcccatcgccgccctcctgtgctacccggccgcgcgataccttatgggcagcatgaccccccaggccgtgctggcgttcgtggccctcatcccgccgaccttgcccggcacaaacatcgtgttgggggcccttccggaggacagacacatcgaccgcctggccaaacgccagcgccccggcgagcggcttgacctggctatgctggccgcgattcgccgcgtttacgggctgcttgccaatacggtgcggtatctgcagggcggcgggtcgtggtgggaggattggggacagctttcggggacggccgtgccgccccagggtgccgagccccagagcaacgcgggcccacgaccccatatcggggacacgttatttaccctgtttcgggcccccgagttgctggcccccaacggcgacctgtataacgtgtttgcctgggccttggacgtcttggccaaacgcctccgtcccatgcacgtctttatcctggattacgaccaatcgcccgccggctgccgggacgccctgctgcaacttacctccgggatggtccagacccacgtcaccaccccaggctccataccgacgatctgcgacctggcgcgcacgtttgcccgggagatgggggaggctaac

SEQ ID NO: 193 - DNA, 1173 bp, Homo sapiens
  misc_feature 1..1173: note = Human TGF-beta isoform 1
  source 1..1173: mol_type = genomic DNA
atgccgccctccgggctgcggctgctgccgctgctgctaccgctgctgtggctactggtgctgacgcctggccggccggccgcgggactatccacctgcaagactatcgacatggagctggtgaagcggaagcgcatcgaggccatccgcggccagatcctgtccaagctgcggctcgccagccccccgagccagggggaggtgccgcccggcccgctgcccgaggccgtgctcgccctgtacaacagcacccgcgaccgggtggccggggagagtgcagaaccggagcccgagcctgaggccgactactacgccaaggaggtcacccgcgtgctaatggtggaaacccacaacgaaatctatgacaagttcaagcagagtacacacagcatatatatgttcttcaacacatcagagctccgagaagcggtacctgaacccgtgttgctctcccgggcagagctgcgtctgctgaggctcaagttaaaagtggagcagcacgtggagctgtaccagaaatacagcaacaattcctggcgatacctcagcaaccggctgctggcacccagcgactcgccagagtggttatcttttgatgtcaccggagttgtgcggcagtggttgagccgtggaggggaaattgagggctttcgccttagcgcccactgctcctgtgacagcagggataacacactgcaagtggacatcaacgggttcactaccggccgccgaggtgacctggccaccattcatggcatgaaccggcctttcctgcttctcatggccaccccgctggagagggcccagcatctgcaaagctcccggcaccgccgagccctggacaccaactattgcttcagctccacggagaagaactgctgcgtgcggcagctgtacattgacttccgcaaggacctcggctggaagtggatccacgagcccaagggctaccatgccaacttctgcctcgggccctgcccctacatttggagcctggacacgcagtacagcaaggtcctggccctgtacaaccagcataacccgggcgcctcggcggcgccgtgctgcgtgccgcaggcgctggagccgctgcccatcgtgtactacgtgggccgcaagcccaaggtggagcagctgtccaacatgatcgtgcgctcctgcaagtgcagctga

SEQ ID NO: 194 - DNA, 699 bp, Homo sapiens
  misc_feature 1..699: note = Human VEGF
  source 1..699: mol_type = genomic DNA
atgaactttctgctgtcttgggtgcattggagccttgccttgctgctctacctccaccatgccaagtggtcccaggctgcacccatggcagaaggaggagggcagaatcatcacgaagtggtgaagttcatggatgtctatcagcgcagctactgccatccaatcgagaccctggtggacatcttccaggagtaccctgatgagatcgagtacatcttcaagccatcctgtgtgcccctgatgcgatgcgggggctgctgcaatgacgagggcctggagtgtgtgcccactgaggagtccaacatcaccatgcagattatgcggatcaaacctcaccaaggccagcacataggagagatgagcttcctacagcacaacaaatgtgaatgcagaccaaagaaagatagagcaagacaagaaaaaaaatcagttcgaggaaagggaaaggggcaaaaacgaaagcgcaagaaatcccggtataagtcctggagcgtgtacgttggtgcccgctgctgtctaatgccctggagcctccctggcccccatccctgtgggccttgctcagagcggagaaagcatttgtttgtacaagatccgcagacgtgtaaatgttcctgcaaaaacacagactcgcgttgcaaggcgaggcagcttgagttaaacgaacgtacttgcagatgtgacaagccgaggcggtga

SEQ ID NO: 195 - DNA, 19 bp, Homo sapiens
  misc_feature 1..19: note = Human TGF-beta isoform 1 shRNA target 1
  source 1..19: mol_type = genomic DNA
gaaacccacaacgaaatct

SEQ ID NO: 196 - DNA, 19 bp, Homo sapiens
  misc_feature 1..19: note = Human TGF-beta isoform1 shRNA target 2
  source 1..19: mol_type = genomic DNA
gtacacacagcatatatat

SEQ ID NO: 197 - DNA, 19 bp, Homo sapiens
  misc_feature 1..19: note = Human TGF-beta isoform1 shRNA target 3
  source 1..19: mol_type = genomic DNA
ctgctgaggctcaagttaa

SEQ ID NO: 198 - DNA, 19 bp, Homo sapiens
  misc_feature 1..19: note = Human TGF-beta isoform1 shRNA target 4
  source 1..19: mol_type = genomic DNA
gtggagctgtaccagaaat

SEQ ID NO: 199 - DNA, 19 bp, Homo sapiens
  misc_feature 1..19: note = Human TGF-beta isoform1 shRNA target 5
  source 1..19: mol_type = genomic DNA
gactcgccagagtggttat

SEQ ID NO: 200 - DNA, 19 bp, Homo sapiens
  misc_feature 1..19: note = Human TGF-beta isoform1 shRNA target 6
  source 1..19: mol_type = genomic DNA
gagccgtggaggggaaatt

SEQ ID NO: 201 - DNA, 19 bp, Homo sapiens
  misc_feature 1..19: note = Human TGF-beta isoform1 shRNA target 7
  source 1..19: mol_type = genomic DNA
cctgtgacagcagggataa

SEQ ID NO: 202 - DNA, 19 bp, Homo sapiens
  misc_feature 1..19: note = Human TGF-beta isoform1 shRNA target 8
  source 1..19: mol_type = genomic DNA
gccctggacaccaactatt

SEQ ID NO: 203 - DNA, 19 bp, Homo sapiens
  misc_feature 1..19: note = Human TGF-beta isoform1 shRNA target 9
  source 1..19: mol_type = genomic DNA
ccctgtacaaccagcataa

SEQ ID NO: 204 - DNA, 19 bp, Homo sapiens
  misc_feature 1..19: note = Human VEGF shRNA target 1
  source 1..19: mol_type = genomic DNA
gagatcgagtacatcttca

SEQ ID NO: 205 - DNA, 19 bp, Homo sapiens
  misc_feature 1..19: note = Human VEGF shRNA target 2
  source 1..19: mol_type = genomic DNA
gcagattatgcggatcaaa

SEQ ID NO: 206 - DNA, 19 bp, Homo sapiens
  misc_feature 1..19: note = Human VEGF shRNA target 3
  source 1..19: mol_type = genomic DNA
gatagagcaagacaagaaa

SEQ ID NO: 207 - DNA, 19 bp, Homo sapiens
  misc_feature 1..19: note = Human VEGF shRNA target 4
  source 1..19: mol_type = genomic DNA
ggagaaagcatttgtttgt

SEQ ID NO: 208 - DNA, 19 bp, Homo sapiens
  misc_feature 1..19: note = Human VEGF shRNA target 5
  source 1..19: mol_type = genomic DNA
gatccgcagacgtgtaaat

SEQ ID NO: 209 - DNA, 19 bp, Homo sapiens
  misc_feature 1..19: note = Human VEGF shRNA target 6
  source 1..19: mol_type = genomic DNA
gcgaggcagcttgagttaa

SEQ ID NO: 210 - DNA, 3888 bp, synthetic construct
  misc_feature 1..3888: note = ARI-134
  source 1..3888: mol_type = other DNA
ctttcctgcgttatcccctgattctgtggataaccgtattaccgcctttgagtgagctgataccgctcgccgcagccgaacgaccgagcgcagcgagtcagtgagcgaggaagcggaagagcgcccaatacgcaaaccgcctctccccgcgcgttggccgattcattaatgcagctggcacgacaggtttcccgactggaaagcgggcagtgagcgcaacgcaattaatacgcgtaccgctagccaggaagagtttgtagaaacgcaaaaaggccatccgtcaggatggccttctgcttagtttgatgcctggcagtttatggcgggcgtcctgcccgccaccctccgggccgttgcttcacaacgttcaaatccgctcccggcggatttgtcctactcaggagagcgttcaccgacaaacaacagataaaacgaaaggcccagtcttccgactgagcctttcgttttatttgatgcctggcagttccctactctcgcgttaacgctagcatggatgttttcccagtcacgacgttgtaaaacgacggccagtcttaagctcgggccccaaataatgattttattttgactgatagtgacctgttcgttgcaacaaattgatgagcaatgcttttttataatgccaactttgtacaaaaaagcaggctttaaaggaaccaattcagtcgagaattggtaccatatttgcatgtcgctatgtgttctgggaaatcaccataaacgtgaaatgtctttggatttgggaatcttataagttctgtatgagaccactccctaggccacactgtatggactattctagagatagtccatacagtgtggcttttttcgacagatctggcgcgccatagtggccagcggccgcaggtaagccagcccaggcctcgccctccagctcaaggcgggacaggtgccctagagtagcctgcatccagggacaggccccagccgggtgctgacacgtccacctccatctcttcctcaggtctgcccgggtggcatccctgtgacccctccccagtgcctctcctggccctggaagttgccactccagtgcccaccagccttgtcctaataaaattaagttgcatcattttgtctgactaggtgtccttctataatattatggggtggaggggggtggtatggagcaaggggcccaagttaacttgtttattgcagcttataatggttacaaataaagcaatagcatcacaaatttcacaaataaagcatttttttcactgcattctagttgtggtttgtccaaactcatcaatgtatcttatcatgtctggatccaaggtcgggcaggaagagggcctatttcccatgattccttcatatttgcatatacgatacaaggctgttagagagataattagaattaatttgactgtaaacacaaagatattagtacaaaatacgtgacgtagaaagtaataatttcttgggtagtttgcagttttaaaattatgttttaaaatggactatcatatgcttaccgtaacttgaaagtatttcgatttcttggctttatatatcttgtggaaaggacgaaactaggccgactacaagcgaattatctagagtaattcgcttgtagtcggcttttttcgagtagctagagaattcatggtaatagcgatgactaatacgtagatgtactgccaagtaggaaagtcccataaggtcatgtactgggcataatgccaggcgggccatttaccgtcattgacgtcaatagggggcgtacttggcatatgatacacttgatgtactgccaagtgggcagtttaccgtaaatagtccacccattgacgtcaatggaaagtccctattggcgttactatgggaacatacgtcattattgacgtcaatgggcgggggtcgttgggcggtcagccaggcgggccatttaccgtaagttatgtaacgcggaactccatatatgggctatgaactaatgaccccgtaattgattactattaataactagacccagctttcttgtacaaagttggcattataagaaagcattgcttatcaatttgttgcaacgaacaggtcactatcagtcaaaataaaatcattatttgccatccagctgatatcccctatagtgagtcgtattacatggtcatagctgtttcctggcagctctggcccgtgtctcaaaatctctgatgttacattgcacaagataaaaatatatcatcatgaacaataaaactgtctgcttacataaacagtaatacaaggggtgttatgagccatattcaacgggaaacgtcgaggccgcgattaaattccaacatggatgctgatttatatgggtataaatgggctcgcgataatgtcgggcaatcaggtgcgacaatctatcgcttgtatgggaagcccgatgcgccagagttgtttctgaaacatggcaaaggtagcgttgccaatgatgttacagatgagatggtcagactaaactggctgacggaatttatgcctcttccgaccatcaagcattttatccgtactcctgatgatgcatggttactcaccactgcgatccccggaaaaacagcattccaggtattagaagaatatcctgattcaggtgaaaatattgttgatgcgctggcagtgttcctgcgccggttgcattcgattcctgtttgtaattgtccttttaacagcgatcgcgtatttcgtctcgctcaggcgcaatcacgaatgaataacggtttggttgatgcgagtgattttgatgacgagcgtaatggctggcctgttgaacaagtctggaaagaaatgcataaacttttgccattctcaccggattcagtcgtcactcatggtgatttctcacttgataaccttatttttgacgaggggaaattaataggttgtattgatgttggacgagtcggaatcgcagaccgataccaggatcttgccatcctatggaactgcctcggtgagttttctccttcattacagaaacggctttttcaaaaatatggtattgataatcctgatatgaataaattgcagtttcatttgatgctcgatgagtttttctaatcagaattggttaattggttgtaacactggcagagcattacgctgacttgacgggacggcgcaagctcatgaccaaaatcccttaacgtgagttacgcgtcgttccactgagcgtcagaccccgtagaaaagatcaaaggatcttcttgagatcctttttttctgcgcgtaatctgctgcttgcaaacaaaaaaaccaccgctaccagcggtggtttgtttgccggatcaagagctaccaactctttttccgaaggtaactggcttcagcagagcgcagataccaaatactgtccttctagtgtagccgtagttaggccaccacttcaagaactctgtagcaccgcctacatacctcgctctgctaatcctgttaccagtggctgctgccagtggcgataagtcgtgtcttaccgggttggactcaagacgatagttaccggataaggcgcagcggtcgggctgaacggggggttcgtgcacacagcccagcttggagcgaacgacctacaccgaactgagatacctacagcgtgagcattgagaaagcgccacgcttcccgaagggagaaaggcggacaggtatccggtaagcggcagggtcggaacaggagagcgcacgagggagcttccagggggaaacgcctggtatctttatagtcctgtcgggtttcgccacctctgacttgagcgtcgatttttgtgatgctcgtcaggggggcggagcctatggaaaaacgccagcaacgcggcctttttacggttcctggccttttgctggccttttgct

SEQ ID NO: 211 - DNA, 3888 bp, synthetic construct
  misc_feature 1..3888: note = ARI-135
  source 1..3888: mol_type = other DNA
ctttcctgcgttatcccctgattctgtggataaccgtattaccgcctttgagtgagctgataccgctcgccgcagccgaacgaccgagcgcagcgagtcagtgagcgaggaagcggaagagcgcccaatacgcaaaccgcctctccccgcgcgttggccgattcattaatgcagctggcacgacaggtttcccgactggaaagcgggcagtgagcgcaacgcaattaatacgcgtaccgctagccaggaagagtttgtagaaacgcaaaaaggccatccgtcaggatggccttctgcttagtttgatgcctggcagtttatggcgggcgtcctgcccgccaccctccgggccgttgcttcacaacgttcaaatccgctcccggcggatttgtcctactcaggagagcgttcaccgacaaacaacagataaaacgaaaggcccagtcttccgactgagcctttcgttttatttgatgcctggcagttccctactctcgcgttaacgctagcatggatgttttcccagtcacgacgttgtaaaacgacggccagtcttaagctcgggccccaaataatgattttattttgactgatagtgacctgttcgttgcaacaaattgatgagcaatgcttttttataatgccaactttgtacaaaaaagcaggctttaaaggaaccaattcagtcgagaattggtaccatatttgcatgtcgctatgtgttctgggaaatcaccataaacgtgaaatgtctttggatttgggaatcttataagttctgtatgagaccactccctaggagctggctcctggtgaattctagagattcaccaggagccagctcttttttcgacagatctggcgcgccatagtggccagcggccgcaggtaagccagcccaggcctcgccctccagctcaaggcgggacaggtgccctagagtagcctgcatccagggacaggccccagccgggtgctgacacgtccacctccatctcttcctcaggtctgcccgggtggcatccctgtgacccctccccagtgcctctcctggccctggaagttgccactccagtgcccaccagccttgtcctaataaaattaagttgcatcattttgtctgactaggtgtccttctataatattatggggtggaggggggtggtatggagcaaggggcccaagttaacttgtttattgcagcttataatggttacaaataaagcaatagcatcacaaatttcacaaataaagcatttttttcactgcattctagttgtggtttgtccaaactcatcaatgtatcttatcatgtctggatccaaggtcgggcaggaagagggcctatttcccatgattccttcatatttgcatatacgatacaaggctgttagagagataattagaattaatttgactgtaaacacaaagatattagtacaaaatacgtgacgtagaaagtaataatttcttgggtagtttgcagttttaaaattatgttttaaaatggactatcatatgcttaccgtaacttgaaagtatttcgatttcttggctttatatatcttgtggaaaggacgaaactaggccgactacaagcgaattatctagagtaattcgcttgtagtcggcttttttcgagtagctagagaattcatggtaatagcgatgactaatacgtagatgtactgccaagtaggaaagtcccataaggtcatgtactgggcataatgccaggcgggccatttaccgtcattgacgtcaatagggggcgtacttggcatatgatacacttgatgtactgccaagtgggcagtttaccgtaaatagtccacccattgacgtcaatggaaagtccctattggcgttactatgggaacatacgtcattattgacgtcaatgggcgggggtcgttgggcggtcagccaggcgggccatttaccgtaagttatgtaacgcggaactccatatatgggctatgaactaatgaccccgtaattgattactattaataactagacccagctttcttgtacaaagttggcattataagaaagcattgcttatcaatttgttgcaacgaacaggtcactatcagtcaaaataaaatcattatttgccatccagctgatatcccctatagtgagtcgtattacatggtcatagctgtttcctggcagctctggcccgtgtctcaaaatctctgatgttacattgcacaagataaaaatatatcatcatgaacaataaaactgtctgcttacataaacagtaatacaaggggtgttatgagccatattcaacgggaaacgtcgaggccgcgattaaattccaacatggatgctgatttatatgggtataaatgggctcgcgataatgtcgggcaatcaggtgcgacaatctatcgcttgtatgggaagcccgatgcgccagagttgtttctgaaacatggcaaaggtagcgttgccaatgatgttacagatgagatggtcagactaaactggctgacggaatttatgcctcttccgaccatcaagcattttatccgtactcctgatgatgcatggttactcaccactgcgatccccggaaaaacagcattccaggtattagaagaatatcctgattcaggtgaaaatattgttgatgcgctggcagtgttcctgcgccggttgcattcgattcctgtttgtaattgtccttttaacagcgatcgcgtatttcgtctcgctcaggcgcaatcacgaatgaataacggtttggttgatgcgagtgattttgatgacgagcgtaatggctggcctgttgaacaagtctggaaagaaatgcataaacttttgccattctcaccggattcagtcgtcactcatggtgatttctcacttgataaccttatttttgacgaggggaaattaataggttgtattgatgttggacgagtcggaatcgcagaccgataccaggatcttgccatcctatggaactgcctcggtgagttttctccttcattacagaaacggctttttcaaaaatatggtattgataatcctgatatgaataaattgcagtttcatttgatgctcgatgagtttttctaatcagaattggttaattggttgtaacactggcagagcattacgctgacttgacgggacggcgcaagctcatgaccaaaatcccttaacgtgagttacgcgtcgttccactgagcgtcagaccccgtagaaaagatcaaaggatcttcttgagatcctttttttctgcgcgtaatctgctgcttgcaaacaaaaaaaccaccgctaccagcggtggtttgtttgccggatcaagagctaccaactctttttccgaaggtaactggcttcagcagagcgcagataccaaatactgtccttctagtgtagccgtagttaggccaccacttcaagaactctgtagcaccgcctacatacctcgctctgctaatcctgttaccagtggctgctgccagtggcgataagtcgtgtcttaccgggttggactcaagacgatagttaccggataaggcgcagcggtcgggctgaacggggggttcgtgcacacagcccagcttggagcgaacgacctacaccgaactgagatacctacagcgtgagcattgagaaagcgccacgcttcccgaagggagaaaggcggacaggtatccggtaagcggcagggtcggaacaggagagcgcacgagggagcttccagggggaaacgcctggtatctttatagtcctgtcgggtttcgccacctctgacttgagcgtcgatttttgtgatgctcgtcaggggggcggagcctatggaaaaacgccagcaacgcggcctttttacggttcctggccttttgctggccttttgct

SEQ ID NO: 212 - DNA, 3888 bp, synthetic construct
  misc_feature 1..3888: note = ARI-136
  source 1..3888: mol_type = other DNA
ctttcctgcgttatcccctgattctgtggataaccgtattaccgcctttgagtgagctgataccgctcgccgcagccgaacgaccgagcgcagcgagtcagtgagcgaggaagcggaagagcgcccaatacgcaaaccgcctctccccgcgcgttggccgattcattaatgcagctggcacgacaggtttcccgactggaaagcgggcagtgagcgcaacgcaattaatacgcgtaccgctagccaggaagagtttgtagaaacgcaaaaaggccatccgtcaggatggccttctgcttagtttgatgcctggcagtttatggcgggcgtcctgcccgccaccctccgggccgttgcttcacaacgttcaaatccgctcccggcggatttgtcctactcaggagagcgttcaccgacaaacaacagataaaacgaaaggcccagtcttccgactgagcctttcgttttatttgatgcctggcagttccctactctcgcgttaacgctagcatggatgttttcccagtcacgacgttgtaaaacgacggccagtcttaagctcgggccccaaataatgattttattttgactgatagtgacctgttcgttgcaacaaattgatgagcaatgcttttttataatgccaactttgtacaaaaaagcaggctttaaaggaaccaattcagtcgagaattggtaccatatttgcatgtcgctatgtgttctgggaaatcaccataaacgtgaaatgtctttggatttgggaatcttataagttctgtatgagaccactccctaggcagctggaattctttctatctagagtagaaagaattccagctgcttttttcgacagatctggcgcgccatagtggccagcggccgcaggtaagccagcccaggcctcgccctccagctcaaggcgggacaggtgccctagagtagcctgcatccagggacaggccccagccgggtgctgacacgtccacctccatctcttcctcaggtctgcccgggtggcatccctgtgacccctccccagtgcctctcctggccctggaagttgccactccagtgcccaccagccttgtcctaataaaattaagttgcatcattttgtctgactaggtgtccttctataatattatggggtggaggggggtggtatggagcaaggggcccaagttaacttgtttattgcagcttataatggttacaaataaagcaatagcatcacaaatttcacaaataaagcatttttttcactgcattctagttgtggtttgtccaaactcatcaatgtatcttatcatgtctggatccaaggtcgggcaggaagagggcctatttcccatgattccttcatatttgcatatacgatacaaggctgttagagagataattagaattaatttgactgtaaacacaaagatattagtacaaaatacgtgacgtagaaagtaataatttcttgggtagtttgcagttttaaaattatgttttaaaatggactatcatatgcttaccgtaacttgaaagtatttcgatttcttggctttatatatcttgtggaaaggacgaaactaggccgactacaagcgaattatctagagtaattcgcttgtagtcggcttttttcgagtagctagagaattcatggtaatagcgatgactaatacgtagatgtactgccaagtaggaaagtcccataaggtcatgtactgggcataatgccaggcgggccatttaccgtcattgacgtcaatagggggcgtacttggcatatgatacacttgatgtactgccaagtgggcagtttaccgtaaatagtccacccattgacgtcaatggaaagtccctattggcgttactatgggaacatacgtcattattgacgtcaatgggcgggggtcgttgggcggtcagccaggcgggccatttaccgtaagttatgtaacgcggaactccatatatgggctatgaactaatgaccccgtaattgattactattaataactagacccagctttcttgtacaaagttggcattataagaaagcattgcttatcaatttgttgcaacgaacaggtcactatcagtcaaaataaaatcattatttgccatccagctgatatcccctatagtgagtcgtattacatggtcatagctgtttcctggcagctctggcccgtgtctcaaaatctctgatgttacattgcacaagataaaaatatatcatcatgaacaataaaactgtctgcttacataaacagtaatacaaggggtgttatgagccatattcaacgggaaacgtcgaggccgcgattaaattccaacatggatgctgatttatatgggtataaatgggctcgcgataatgtcgggcaatcaggtgcgacaatctatcgcttgtatgggaagcccgatgcgccagagttgtttctgaaacatggcaaaggtagcgttgccaatgatgttacagatgagatggtcagactaaactggctgacggaatttatgcctcttccgaccatcaagcattttatccgtactcctgatgatgcatggttactcaccactgcgatccccggaaaaacagcattccaggtattagaagaatatcctgattcaggtgaaaatattgttgatgcgctggcagtgttcctgcgccggttgcattcgattcctgtttgtaattgtccttttaacagcgatcgcgtatttcgtctcgctcaggcgcaatcacgaatgaataacggtttggttgatgcgagtgattttgatgacgagcgtaatggctggcctgttgaacaagtctggaaagaaatgcataaacttttgccattctcaccggattcagtcgtcactcatggtgatttctcacttgataaccttatttttgacgaggggaaattaataggttgtattgatgttggacgagtcggaatcgcagaccgataccaggatcttgccatcctatggaactgcctcggtgagttttctccttcattacagaaacggctttttcaaaaatatggtattgataatcctgatatgaataaattgcagtttcatttgatgctcgatgagtttttctaatcagaattggttaattggttgtaacactggcagagcattacgctgacttgacgggacggcgcaagctcatgaccaaaatcccttaacgtgagttacgcgtcgttccactgagcgtcagaccccgtagaaaagatcaaaggatcttcttgagatcctttttttctgcgcgtaatctgctgcttgcaaacaaaaaaaccaccgctaccagcggtggtttgtttgccggatcaagagctaccaactctttttccgaaggtaactggcttcagcagagcgcagataccaaatactgtccttctagtgtagccgtagttaggccaccacttcaagaactctgtagcaccgcctacatacctcgctctgctaatcctgttaccagtggctgctgccagtggcgataagtcgtgtcttaccgggttggactcaagacgatagttaccggataaggcgcagcggtcgggctgaacggggggttcgtgcacacagcccagcttggagcgaacgacctacaccgaactgagatacctacagcgtgagcattgagaaagcgccacgcttcccgaagggagaaaggcggacaggtatccggtaagcggcagggtcggaacaggagagcgcacgagggagcttccagggggaaacgcctggtatctttatagtcctgtcgggtttcgccacctctgacttgagcgtcgatttttgtgatgctcgtcaggggggcggagcctatggaaaaacgccagcaacgcggcctttttacggttcctggccttttgctggccttttgct

SEQ ID NO: 213 - DNA, 3890 bp, synthetic construct
  misc_feature 1..3890: note = ARI-137
  source 1..3890: mol_type = other DNA
ctttcctgcgttatcccctgattctgtggataaccgtattaccgcctttgagtgagctgataccgctcgccgcagccgaacgaccgagcgcagcgagtcagtgagcgaggaagcggaagagcgcccaatacgcaaaccgcctctccccgcgcgttggccgattcattaatgcagctggcacgacaggtttcccgactggaaagcgggcagtgagcgcaacgcaattaatacgcgtaccgctagccaggaagagtttgtagaaacgcaaaaaggccatccgtcaggatggccttctgcttagtttgatgcctggcagtttatggcgggcgtcctgcccgccaccctccgggccgttgcttcacaacgttcaaatccgctcccggcggatttgtcctactcaggagagcgttcaccgacaaacaacagataaaacgaaaggcccagtcttccgactgagcctttcgttttatttgatgcctggcagttccctactctcgcgttaacgctagcatggatgttttcccagtcacgacgttgtaaaacgacggccagtcttaagctcgggccccaaataatgattttattttgactgatagtgacctgttcgttgcaacaaattgatgagcaatgcttttttataatgccaactttgtacaaaaaagcaggctttaaaggaaccaattcagtcgagaattggtaccatatttgcatgtcgctatgtgttctgggaaatcaccataaacgtgaaatgtctttggatttgggaatcttataagttctgtatgagaccactccctaggatgtgaccttctacaagattctagagatcttgtagaaggtcacatcttttttcgacagatctggcgcgccatagtggccagcggccgcaggtaagccagcccaggcctcgccctccagctcaaggcgggacaggtgccctagagtagcctgcatccagggacaggccccagccgggtgctgacacgtccacctccatctcttcctcaggtctgcccgggtggcatccctgtgacccctccccagtgcctctcctggccctggaagttgccactccagtgcccaccagccttgtcctaataaaattaagttgcatcattttgtctgactaggtgtccttctataatattatggggtggaggggggtggtatggagcaaggggcccaagttaacttgtttattgcagcttataatggttacaaataaagcaatagcatcacaaatttcacaaataaagcatttttttcactgcattctagttgtggtttgtccaaactcatcaatgtatcttatcatgtctggatccaaggtcgggcaggaagagggcctatttcccatgattccttcatatttgcatatacgatacaaggctgttagagagataattagaattaatttgactgtaaacacaaagatattagtacaaaatacgtgacgtagaaagtaataatttcttgggtagtttgcagttttaaaattatgttttaaaatggactatcatatgcttaccgtaacttgaaagtatttcgatttcttggctttatatatcttgtggaaaggacgaaactaggccgactacaagcgaattatctagagtaattcgcttgtagtcggcttttttcgagtagctagagaattcatggtaatagcgatgactaatacgtagatgtactgccaagtaggaaagtcccataaggtcatgtactgggcataatgccaggcgggccatttaccgtcattgacgtcaatagggggcgtacttggcatatgatacacttgatgtactgccaagtgggcagtttaccgtaaatagtccacccattgacgtcaatggaaagtccctattggcgttactatgggaacatacgtcattattgacgtcaatgggcgggggtcgttgggcggtcagccaggcgggccatttaccgtaagttatgtaacgcggaactccatatatgggctatgaactaatgaccccgtaattgattactattaataactagacccagctttcttgtacaaagttggcattataagaaagcattgcttatcaatttgttgcaacgaacaggtcactatcagtcaaaataaaatcattatttgccatccagctgatatcccctatagtgagtcgtattacatggtcatagctgtttcctggcagctctggcccgtgtctcaaaatctctgatgttacattgcacaagataaaaatatatcatcatgaacaataaaactgtctgcttacataaacagtaatacaaggggtgttatgagccatattcaacgggaaacgtcgaggccgcgattaaattccaacatggatgctgatttatatgggtataaatgggctcgcgataatgtcgggcaatcaggtgcgacaatctatcgcttgtatgggaagcccgatgcgccagagttgtttctgaaacatggcaaaggtagcgttgccaatgatgttacagatgagatggtcagactaaactggctgacggaatttatgcctcttccgaccatcaagcattttatccgtactcctgatgatgcatggttactcaccactgcgatccccggaaaaacagcattccaggtattagaagaatatcctgattcaggtgaaaatattgttgatgcgctggcagtgttcctgcgccggttgcattcgattcctgtttgtaattgtccttttaacagcgatcgcgtatttcgtctcgctcaggcgcaatcacgaatgaataacggtttggttgatgcgagtgattttgatgacgagcgtaatggctggcctgttgaacaagtctggaaagaaatgcataaacttttgccattctcaccggattcagtcgtcactcatggtgatttctcacttgataaccttatttttgacgaggggaaattaataggttgtattgatgttggacgagtcggaatcgcagaccgataccaggatcttgccatcctatggaactgcctcggtgagttttctccttcattacagaaacggctttttcaaaaatatggtattgataatcctgatatgaataaattgcagtttcatttgatgctcgatgagtttttctaatcagaattggttaattggttgtaacactggcagagcattacgctgacttgacgggacggcgcaagctcatgaccaaaatcccttaacgtgagttacgcgtcgttccactgagcgtcagaccccgtagaaaagatcaaaggatcttcttgagatcctttttttctgcgcgtaatctgctgcttgcaaacaaaaaaaccaccgctaccagcggtggtttgtttgccggatcaagagctaccaactctttttccgaaggtaactggcttcagcagagcgcagataccaaatactgtccttctagtgtagccgtagttaggccaccacttcaagaactctgtagcaccgcctacatacctcgctctgctaatcctgttaccagtggctgctgccagtggcgataagtcgtgtcttaccgggttggactcaagacgatagttaccggataaggcgcagcggtcgggctgaacggggggttcgtgcacacagcccagcttggagcgaacgacctacaccgaactgagatacctacagcgtgagcattgagaaagcgccacgcttcccgaagggagaaaggcggacaggtatccggtaagcggcagggtcggaacaggagagcgcacgagggagcttccagggggaaacgcctggtatctttatagtcctgtcgggtttcgccacctctgacttgagcgtcgatttttgtgatgctcgtcaggggggcggagcctatggaaaaacgccagcaacgcggcctttttacggttcctggccttttgctggccttttgct

SEQ ID NO: 214 - DNA, 3379 bp, synthetic construct
  misc_feature 1018..1038: note = n may be any nucleotide
  misc_feature 1060..1080: note = n may be any nucleotide
  misc_feature 1..3379: note = source = ARI-205
  source 1..3379: mol_type = other DNA
ctttcctgcgttatcccctgattctgtggataaccgtattaccgcctttgagtgagctgataccgctcgccgcagccgaacgaccgagcgcagcgagtcagtgagcgaggaagcggaagagcgcccaatacgcaaaccgcctctccccgcgcgttggccgattcattaatgcagctggcacgacaggtttcccgactggaaagcgggcagtgagcgcaacgcaattaatacgcgtaccgctagccaggaagagtttgtagaaacgcaaaaaggccatccgtcaggatggccttctgcttagtttgatgcctggcagtttatggcgggcgtcctgcccgccaccctccgggccgttgcttcacaacgttcaaatccgctcccggcggatttgtcctactcaggagagcgttcaccgacaaacaacagataaaacgaaaggcccagtcttccgactgagcctttcgttttatttgatgcctggcagttccctactctcgcgttaacgctagcatggatgttttcccagtcacgacgttgtaaaacgacggccagtcttaagctcgggccccaaataatgattttattttgactgatagtgacctgttcgttgcaacaaattgatgagcaatgcttttttataatgccaactttgtacaaaaaagcaggctttaaaggaaccaattcagtcgactggatccaaggtcgggcaggaagagggcctatttcccatgattccttcatatttgcatatacgatacaaggctgttagagagataattagaattaatttgactgtaaacacaaagatattagtacaaaatacgtgacgtagaaagtaataatttcttgggtagtttgcagttttaaaattatgttttaaaatggactatcatatgcttaccgtaacttgaaagtatttcgatttcttggctttatatatcttgtggaaaggacgaaactagtccggatcaacgccctaggtttatgtttggatgaactgacatacgcgtatccgtcnnnnnnnnnnnnnnnnnnnnngtagtgaaatatatattaaacnnnnnnnnnnnnnnnnnnnnntacggtaacgcggaattcgcaactattttatcaattttttgcgtcgactcgagtagctagagaattcatggtaatagcgatgactaatacgtagatgtactgccaagtaggaaagtcccataaggtcatgtactgggcataatgccaggcgggccatttaccgtcattgacgtcaatagggggcgtacttggcatatgatacacttgatgtactgccaagtgggcagtttaccgtaaatagtccacccattgacgtcaatggaaagtccctattggcgttactatgggaacatacgtcattattgacgtcaatgggcgggggtcgttgggcggtcagccaggcgggccatttaccgtaagttatgtaacgcggaactccatatatgggctatgaactaatgaccccgtaattgattactattaataactagacccagctttcttgtacaaagttggcattataagaaagcattgcttatcaatttgttgcaacgaacaggtcactatcagtcaaaataaaatcattatttgccatccagctgatatcccctatagtgagtcgtattacatggtcatagctgtttcctggcagctctggcccgtgtctcaaaatctctgatgttacattgcacaagataaaaatatatcatcatgaacaataaaactgtctgcttacataaacagtaatacaaggggtgttatgagccatattcaacgggaaacgtcgaggccgcgattaaattccaacatggatgctgatttatatgggtataaatgggctcgcgataatgtcgggcaatcaggtgcgacaatctatcgcttgtatgggaagcccgatgcgccagagttgtttctgaaacatggcaaaggtagcgttgccaatgatgttacagatgagatggtcagactaaactggctgacggaatttatgcctcttccgaccatcaagcattttatccgtactcctgatgatgcatggttactcaccactgcgatccccggaaaaacagcattccaggtattagaagaatatcctgattcaggtgaaaatattgttgatgcgctggcagtgttcctgcgccggttgcattcgattcctgtttgtaattgtccttttaacagcgatcgcgtatttcgtctcgctcaggcgcaatcacgaatgaataacggtttggttgatgcgagtgattttgatgacgagcgtaatggctggcctgttgaacaagtctggaaagaaatgcataaacttttgccattctcaccggattcagtcgtcactcatggtgatttctcacttgataaccttatttttgacgaggggaaattaataggttgtattgatgttggacgagtcggaatcgcagaccgataccaggatcttgccatcctatggaactgcctcggtgagttttctccttcattacagaaacggctttttcaaaaatatggtattgataatcctgatatgaataaattgcagtttcatttgatgctcgatgagtttttctaatcagaattggttaattggttgtaacactggcagagcattacgctgacttgacgggacggcgcaagctcatgaccaaaatcccttaacgtgagttacgcgtcgttccactgagcgtcagaccccgtagaaaagatcaaaggatcttcttgagatcctttttttctgcgcgtaatctgctgcttgcaaacaaaaaaaccaccgctaccagcggtggtttgtttgccggatcaagagctaccaactctttttccgaaggtaactggcttcagcagagcgcagataccaaatactgtccttctagtgtagccgtagttaggccaccacttcaagaactctgtagcaccgcctacatacctcgctctgctaatcctgttaccagtggctgctgccagtggcgataagtcgtgtcttaccgggttggactcaagacgatagttaccggataaggcgcagcggtcgggctgaacggggggttcgtgcacacagcccagcttggagcgaacgacctacaccgaactgagatacctacagcgtgagcattgagaaagcgccacgcttcccgaagggagaaaggcggacaggtatccggtaagcggcagggtcggaacaggagagcgcacgagggagcttccagggggaaacgcctggtatctttatagtcctgtcgggtttcgccacctctgacttgagcgtcgatttttgtgatgctcgtcaggggggcggagcctatggaaaaacgccagcaacgcggcctttttacggttcctggccttttgctggccttttgct

SEQ ID NO: 215 - DNA, 4744 bp, synthetic construct
  misc_feature 3377..3398: note = n may be any nucleotide
  misc_feature 3418..3439: note = n may be any nucleotide
  misc_feature 1..4744: note = source = ARI-206
  source 1..4744: mol_type = other DNA
aacatgtgagcaaaaggccagcaaaaggccaggaaccgtaaaaaggccgcgttgctggcgtttttccataggctccgcccccctgacgagcatcacaaaaatcgacgctcaagtcagaggtggcgaaacccgacaggactataaagataccaggcgtttccccctggaagctccctcgtgcgctctcctgttccgaccctgccgcttaccggatacctgtccgcctttctcccttcgggaagcgtggcgctttctcaatgctcacgctgtaggtatctcagttcggtgtaggtcgttcgctccaagctgggctgtgtgcacgaaccccccgttcagcccgaccgctgcgccttatccggtaactatcgtcttgagtccaacccggtaagacacgacttatcgccactggcagcagccactggtaacaggattagcagagcgaggtatgtaggcggtgctacagagttcttgaagtggtggcctaactacggctacactagaaggacagtatttggtatctgcgctctgctgaagccagttaccttcggaaaaagagttggtagctcttgatccggcaaacaaaccaccgctggtagcggtggtttttttgtttgcaagcagcagattacgcgcagaaaaaaaggatctcaagaagatcctttgatcttttctacggggtctgacgctcagtggaacgacgcgtaactcacgttaagggattttggtcatgagcttgcgccgtcccgtcaagtcagcgtaatgctctgccagtgttacaaccaattaaccaattctgattagaaaaactcatcgagcatcaaatgaaactgcaatttattcatatcaggattatcaataccatatttttgaaaaagccgtttctgtaatgaaggagaaaactcaccgaggcagttccataggatggcaagatcctggtatcggtctgcgattccgactcgtccaacatcaatacaacctattaatttcccctcgtcaaaaataaggttatcaagtgagaaatcaccatgagtgacgactgaatccggtgagaatggcaaaagtttatgcatttctttccagacttgttcaacaggccagccattacgctcgtcatcaaaatcactcgcatcaaccaaaccgttattcattcgtgattgcgcctgagcgagacgaaatacgcgatcgctgttaaaaggacaattacaaacaggaatcgaatgcaaccggcgcaggaacactgccagcgcatcaacaatattttcacctgaatcaggatattcttctaatacctggaatgctgtttttccggggatcgcagtggtgagtaaccatgcatcatcaggagtacggataaaatgcttgatggtcggaagaggcataaattccgtcagccagtttagtctgaccatctcatctgtaacatcattggcaacgctacctttgccatgtttcagaaacaactctggcgcatcgggcttcccatacaagcgatagattgtcgcacctgattgcccgacattatcgcgagcccatttatacccatataaatcagcatccatgttggaatttaatcgcggcctcgacgtttcccgttgaatatggctcataacaccccttgtattactgtttatgtaagcagacagttttattgttcatgatgatatatttttatcttgtgcaatgtaacatcagagattttgagacacgggccagagctgccaggaaacagctatgaccatgtaatacgactcactataggggatatcagctggatggcaaataatgattttattttgactgatagtgacctgttcgttgcaacaaattgataagcaatgctttcttataatgccaactttgtacaagaaagctgggtctagttattaatagtaatcaattacggggtcattagttcatagcccatatatggagttccgcgttacataacttacggtaaatggcccgcctggctgaccgcccaacgacccccgcccattgacgtcaataatgacgtatgttcccatagtaacgccaatagggactttccattgacgtcaatgggtggactatttacggtaaactgcccacttggcagtacatcaagtgtatcatatgccaagtacgccccctattgacgtcaatgacggtaaatggcccgcctggcattatgcccagtacatgaccttatgggactttcctacttggcagtacatctacgtattagtcatcgctattaccatggtgatgcggttttggcagtacatcaatgggcgtggatagcggtttgactcacggggatttccaagtctccaccccattgacgtcaatgggagtttgttttggcaccaaaatcaacgggactttccaaaatgtcgtaacaactccgccccattgacgcaaatgggcggtaggcgtgtacggtgggaggtctatataagcagagctctctggctaactagagaacccactgcttactggcttatcgaaattaatacgactcactatagggagacccaagcttagatctgtttccggtcgccaccatgagcgagctgatcaaggagaacatgcacatgaagctgtacatggagggcaccgtgaacaaccaccacttcaagtgcacatccgagggcgaaggcaagccctacgagggcacccagaccatgaagatcaaggtggtcgagggcggccctctccccttcgccttcgacatcctggctaccagcttcatgtacggcagcaaagccttcatcaaccacacccagggcatccccgacttctttaagcagtccttccctgagggcttcacatgggagagaatcaccacatacgaagacgggggcgtgctgaccgctacccaggacaccagcttccagaacggctgcatcatctacaacgtcaagatcaacggggtgaacttcccatccaacggccctgtgatgcagaagaaaacacgcggctgggaggccaacaccgagatgctgtaccccgctgacggcggcctgagaggccacagccagatggccctgaagctcgtgggcgggggctacctgcactgctccttcaagaccacatacagatccaagaaacccgctaagaacctcaagatgcccggcttccacttcgtggaccacagactggaaagaatcaaggaggccgacaaagagacctacgtcgagcagcacgagatggctgtggccaagtactgcgacctccctagcaaactggggcacagataatcgatagtttgtttgaatgaggcttcagtactttacagaatcgttgcctgcacatcttggaaacacttgctgggattacttcttcaggttaacccaacagaaggctcgagaaggtatattgctgttgacagtgagcgnnnnnnnnnnnnnnnnnnnnnntagtgaagccacagatgtannnnnnnnnnnnnnnnnnnnnntgcctactgcctcggaattcaaggggctactttaggagcaattatcttgtttactaaaactgaataccttgctatctctttgatacatttttacaaagctgaattaaaatggtataaattaaatcacttttttcaattctctagaggtaccgcatgcgtacgtggccagcggccgcaggtaagccagcccaggcctcgccctccagctcaaggcgggacaggtgccctagagtagcctgcatccagggacaggccccagccgggtgctgacacgtccacctccatctcttcctcaggtctgcccgggtggcatccctgtgacccctccccagtgcctctcctggccctggaagttgccactccagtgcccaccagccttgtcctaataaaattaagttgcatcattttgtctgactaggtgtccttctataatattatggggtggaggggggtggtatggagcaaggggcccaagttaacttgtttattgcagcttataatggttacaaataaagcaatagcatcacaaatttcacaaataaagcatttttttcactgcattctagttgtggtttgtccaaactcatcaatgtatcttatcatgtctggatccagtcgactgaattggttcctttaaagcctgcttttttgtacaaagttggcattataaaaaagcattgctcatcaatttgttgcaacgaacaggtcactatcagtcaaaataaaatcattatttggggcccgagcttaagactggccgtcgttttacaacgtcgtgactgggaaaacatccatgctagcgttaacgcgagagtagggaactgccaggcatcaaataaaacgaaaggctcagtcggaagactgggcctttcgttttatctgttgtttgtcggtgaacgctctcctgagtaggacaaatccgccgggagcggatttgaacgttgtgaagcaacggcccggagggtggcgggcaggacgcccgccataaactgccaggcatcaaactaagcagaaggccatcctgacggatggcctttttgcgtttctacaaactcttcctggctagcggtacgcgtattaattgcgttgcgctcactgcccgctttccagtcgggaaacctgtcgtgccagctgcattaatgaatcggccaacgcgcggggagaggcggtttgcgtattgggcgctcttccgcttcctcgctcactgactcgctgcgctcggtcgttcggctgcggcgagcggtatcagctcactcaaaggcggtaatacggttatccacagaatcaggggataacgcaggaaag

SEQ ID NO: 216 - DNA, 3377 bp, synthetic construct
  misc_feature 1018..1036: note = n may be any nucleotide
  misc_feature 1058..1078: note = n may be any nucleotide
  misc_feature 1..3377: note = source = ARI-207
  source 1..3377: mol_type = other DNA
ctttcctgcgttatcccctgattctgtggataaccgtattaccgcctttgagtgagctgataccgctcgccgcagccgaacgaccgagcgcagcgagtcagtgagcgaggaagcggaagagcgcccaatacgcaaaccgcctctccccgcgcgttggccgattcattaatgcagctggcacgacaggtttcccgactggaaagcgggcagtgagcgcaacgcaattaatacgcgtaccgctagccaggaagagtttgtagaaacgcaaaaaggccatccgtcaggatggccttctgcttagtttgatgcctggcagtttatggcgggcgtcctgcccgccaccctccgggccgttgcttcacaacgttcaaatccgctcccggcggatttgtcctactcaggagagcgttcaccgacaaacaacagataaaacgaaaggcccagtcttccgactgagcctttcgttttatttgatgcctggcagttccctactctcgcgttaacgctagcatggatgttttcccagtcacgacgttgtaaaacgacggccagtcttaagctcgggccccaaataatgattttattttgactgatagtgacctgttcgttgcaacaaattgatgagcaatgcttttttataatgccaactttgtacaaaaaagcaggctttaaaggaaccaattcagtcgactggatccaaggtcgggcaggaagagggcctatttcccatgattccttcatatttgcatatacgatacaaggctgttagagagataattagaattaatttgactgtaaacacaaagatattagtacaaaatacgtgacgtagaaagtaataatttcttgggtagtttgcagttttaaaattatgttttaaaatggactatcatatgcttaccgtaacttgaaagtatttcgatttcttggctttatatatcttgtggaaaggacgaaactagtccggatcaacgccctaggtttatgtttggatgaactgacatacgcgtatccgtcnnnnnnnnnnnnnnnnnnngtagtgaaatatatattaaacnnnnnnnnnnnnnnnnnnnnntacggtaacgcggaattcgcaactattttatcaattttttgcgtcgactcgagtagctagagaattcatggtaatagcgatgactaatacgtagatgtactgccaagtaggaaagtcccataaggtcatgtactgggcataatgccaggcgggccatttaccgtcattgacgtcaatagggggcgtacttggcatatgatacacttgatgtactgccaagtgggcagtttaccgtaaatagtccacccattgacgtcaatggaaagtccctattggcgttactatgggaacatacgtcattattgacgtcaatgggcgggggtcgttgggcggtcagccaggcgggccatttaccgtaagttatgtaacgcggaactccatatatgggctatgaactaatgaccccgtaattgattactattaataactagacccagctttcttgtacaaagttggcattataagaaagcattgcttatcaatttgttgcaacgaacaggtcactatcagtcaaaataaaatcattatttgccatccagctgatatcccctatagtgagtcgtattacatggtcatagctgtttcctggcagctctggcccgtgtctcaaaatctctgatgttacattgcacaagataaaaatatatcatcatgaacaataaaactgtctgcttacataaacagtaatacaaggggtgttatgagccatattcaacgggaaacgtcgaggccgcgattaaattccaacatggatgctgatttatatgggtataaatgggctcgcgataatgtcgggcaatcaggtgcgacaatctatcgcttgtatgggaagcccgatgcgccagagttgtttctgaaacatggcaaaggtagcgttgccaatgatgttacagatgagatggtcagactaaactggctgacggaatttatgcctcttccgaccatcaagcattttatccgtactcctgatgatgcatggttactcaccactgcgatccccggaaaaacagcattccaggtattagaagaatatcctgattcaggtgaaaatattgttgatgcgctggcagtgttcctgcgccggttgcattcgattcctgtttgtaattgtccttttaacagcgatcgcgtatttcgtctcgctcaggcgcaatcacgaatgaataacggtttggttgatgcgagtgattttgatgacgagcgtaatggctggcctgttgaacaagtctggaaagaaatgcataaacttttgccattctcaccggattcagtcgtcactcatggtgatttctcacttgataaccttatttttgacgaggggaaattaataggttgtattgatgttggacgagtcggaatcgcagaccgataccaggatcttgccatcctatggaactgcctcggtgagttttctccttcattacagaaacggctttttcaaaaatatggtattgataatcctgatatgaataaattgcagtttcatttgatgctcgatgagtttttctaatcagaattggttaattggttgtaacactggcagagcattacgctgacttgacgggacggcgcaagctcatgaccaaaatcccttaacgtgagttacgcgtcgttccactgagcgtcagaccccgtagaaaagatcaaaggatcttcttgagatcctttttttctgcgcgtaatctgctgcttgcaaacaaaaaaaccaccgctaccagcggtggtttgtttgccggatcaagagctaccaactctttttccgaaggtaactggcttcagcagagcgcagataccaaatactgtccttctagtgtagccgtagttaggccaccacttcaagaactctgtagcaccgcctacatacctcgctctgctaatcctgttaccagtggctgctgccagtggcgataagtcgtgtcttaccgggttggactcaagacgatagttaccggataaggcgcagcggtcgggctgaacggggggttcgtgcacacagcccagcttggagcgaacgacctacaccgaactgagatacctacagcgtgagcattgagaaagcgccacgcttcccgaagggagaaaggcggacaggtatccggtaagcggcagggtcggaacaggagagcgcacgagggagcttccagggggaaacgcctggtatctttatagtcctgtcgggtttcgccacctctgacttgagcgtcgatttttgtgatgctcgtcaggggggcggagcctatggaaaaacgccagcaacgcggcctttttacggttcctggccttttgctggccttttgct

SEQ ID NO: 217 - DNA, 4738 bp, synthetic construct
  misc_feature 3377..3395: note = n may be any nucleotide
  misc_feature 3415..3433: note = n may be any nucleotide
  misc_feature 1..4738: note = source = ARI-208
  source 1..4738: mol_type = other DNA
aacatgtgagcaaaaggccagcaaaaggccaggaaccgtaaaaaggccgcgttgctggcgtttttccataggctccgcccccctgacgagcatcacaaaaatcgacgctcaagtcagaggtggcgaaacccgacaggactataaagataccaggcgtttccccctggaagctccctcgtgcgctctcctgttccgaccctgccgcttaccggatacctgtccgcctttctcccttcgggaagcgtggcgctttctcaatgctcacgctgtaggtatctcagttcggtgtaggtcgttcgctccaagctgggctgtgtgcacgaaccccccgttcagcccgaccgctgcgccttatccggtaactatcgtcttgagtccaacccggtaagacacgacttatcgccactggcagcagccactggtaacaggattagcagagcgaggtatgtaggcggtgctacagagttcttgaagtggtggcctaactacggctacactagaaggacagtatttggtatctgcgctctgctgaagccagttaccttcggaaaaagagttggtagctcttgatccggcaaacaaaccaccgctggtagcggtggtttttttgtttgcaagcagcagattacgcgcagaaaaaaaggatctcaagaagatcctttgatcttttctacggggtctgacgctcagtggaacgacgcgtaactcacgttaagggattttggtcatgagcttgcgccgtcccgtcaagtcagcgtaatgctctgccagtgttacaaccaattaaccaattctgattagaaaaactcatcgagcatcaaatgaaactgcaatttattcatatcaggattatcaataccatatttttgaaaaagccgtttctgtaatgaaggagaaaactcaccgaggcagttccataggatggcaagatcctggtatcggtctgcgattccgactcgtccaacatcaatacaacctattaatttcccctcgtcaaaaataaggttatcaagtgagaaatcaccatgagtgacgactgaatccggtgagaatggcaaaagtttatgcatttctttccagacttgttcaacaggccagccattacgctcgtcatcaaaatcactcgcatcaaccaaaccgttattcattcgtgattgcgcctgagcgagacgaaatacgcgatcgctgttaaaaggacaattacaaacaggaatcgaatgcaaccggcgcaggaacactgccagcgcatcaacaatattttcacctgaatcaggatattcttctaatacctggaatgctgtttttccggggatcgcagtggtgagtaaccatgcatcatcaggagtacggataaaatgcttgatggtcggaagaggcataaattccgtcagccagtttagtctgaccatctcatctgtaacatcattggcaacgctacctttgccatgtttcagaaacaactctggcgcatcgggcttcccatacaagcgatagattgtcgcacctgattgcccgacattatcgcgagcccatttatacccatataaatcagcatccatgttggaatttaatcgcggcctcgacgtttcccgttgaatatggctcataacaccccttgtattactgtttatgtaagcagacagttttattgttcatgatgatatatttttatcttgtgcaatgtaacatcagagattttgagacacgggccagagctgccaggaaacagctatgaccatgtaatacgactcactataggggatatcagctggatggcaaataatgattttattttgactgatagtgacctgttcgttgcaacaaattgataagcaatgctttcttataatgccaactttgtacaagaaagctgggtctagttattaatagtaatcaattacggggtcattagttcatagcccatatatggagttccgcgttacataacttacggtaaatggcccgcctggctgaccgcccaacgacccccgcccattgacgtcaataatgacgtatgttcccatagtaacgccaatagggactttccattgacgtcaatgggtggactatttacggtaaactgcccacttggcagtacatcaagtgtatcatatgccaagtacgccccctattgacgtcaatgacggtaaatggcccgcctggcattatgcccagtacatgaccttatgggactttcctacttggcagtacatctacgtattagtcatcgctattaccatggtgatgcggttttggcagtacatcaatgggcgtggatagcggtttgactcacggggatttccaagtctccaccccattgacgtcaatgggagtttgttttggcaccaaaatcaacgggactttccaaaatgtcgtaacaactccgccccattgacgcaaatgggcggtaggcgtgtacggtgggaggtctatataagcagagctctctggctaactagagaacccactgcttactggcttatcgaaattaatacgactcactatagggagacccaagcttagatctgtttccggtcgccaccatgagcgagctgatcaaggagaacatgcacatgaagctgtacatggagggcaccgtgaacaaccaccacttcaagtgcacatccgagggcgaaggcaagccctacgagggcacccagaccatgaagatcaaggtggtcgagggcggccctctccccttcgccttcgacatcctggctaccagcttcatgtacggcagcaaagccttcatcaaccacacccagggcatccccgacttctttaagcagtccttccctgagggcttcacatgggagagaatcaccacatacgaagacgggggcgtgctgaccgctacccaggacaccagcttccagaacggctgcatcatctacaacgtcaagatcaacggggtgaacttcccatccaacggccctgtgatgcagaagaaaacacgcggctgggaggccaacaccgagatgctgtaccccgctgacggcggcctgagaggccacagccagatggccctgaagctcgtgggcgggggctacctgcactgctccttcaagaccacatacagatccaagaaacccgctaagaacctcaagatgcccggcttccacttcgtggaccacagactggaaagaatcaaggaggccgacaaagagacctacgtcgagcagcacgagatggctgtggccaagtactgcgacctccctagcaaactggggcacagataatcgatagtttgtttgaatgaggcttcagtactttacagaatcgttgcctgcacatcttggaaacacttgctgggattacttcttcaggttaacccaacagaaggctcgagaaggtatattgctgttgacagtgagcgnnnnnnnnnnnnnnnnnnntagtgaagccacagatgtannnnnnnnnnnnnnnnnnntgcctactgcctcggaattcaaggggctactttaggagcaattatcttgtttactaaaactgaataccttgctatctctttgatacatttttacaaagctgaattaaaatggtataaattaaatcacttttttcaattctctagaggtaccgcatgcgtacgtggccagcggccgcaggtaagccagcccaggcctcgccctccagctcaaggcgggacaggtgccctagagtagcctgcatccagggacaggccccagccgggtgctgacacgtccacctccatctcttcctcaggtctgcccgggtggcatccctgtgacccctccccagtgcctctcctggccctggaagttgccactccagtgcccaccagccttgtcctaataaaattaagttgcatcattttgtctgactaggtgtccttctataatattatggggtggaggggggtggtatggagcaaggggcccaagttaacttgtttattgcagcttataatggttacaaataaagcaatagcatcacaaatttcacaaataaagcatttttttcactgcattctagttgtggtttgtccaaactcatcaatgtatcttatcatgtctggatccagtcgactgaattggttcctttaaagcctgcttttttgtacaaagttggcattataaaaaagcattgctcatcaatttgttgcaacgaacaggtcactatcagtcaaaataaaatcattatttggggcccgagcttaagactggccgtcgttttacaacgtcgtgactgggaaaacatccatgctagcgttaacgcgagagtagggaactgccaggcatcaaataaaacgaaaggctcagtcggaagactgggcctttcgttttatctgttgtttgtcggtgaacgctctcctgagtaggacaaatccgccgggagcggatttgaacgttgtgaagcaacggcccggagggtggcgggcaggacgcccgccataaactgccaggcatcaaactaagcagaaggccatcctgacggatggcctttttgcgtttctacaaactcttcctggctagcggtacgcgtattaattgcgttgcgctcactgcccgctttccagtcgggaaacctgtcgtgccagctgcattaatgaatcggccaacgcgcggggagaggcggtttgcgtattgggcgctcttccgcttcctcgctcactgactcgctgcgctcggtcgttcggctgcggcgagcggtatcagctcactcaaaggcggtaatacggttatccacagaatcaggggataacgcaggaaag

SEQ ID NO: 218 - DNA, 6329 bp, synthetic construct
  misc_feature 1..6329: note = pKD46
  source 1..6329: mol_type = other DNA
catcgatttattatgacaacttgacggctacatcattcactttttcttcacaaccggcacggaactcgctcgggctggccccggtgcattttttaaatacccgcgagaaatagagttgatcgtcaaaaccaacattgcgaccgacggtggcgataggcatccgggtggtgctcaaaagcagcttcgcctggctgatacgttggtcctcgcgccagcttaagacgctaatccctaactgctggcggaaaagatgtgacagacgcgacggcgacaagcaaacatgctgtgcgacgctggcgatatcaaaattgctgtctgccaggtgatcgctgatgtactgacaagcctcgcgtacccgattatccatcggtggatggagcgactcgttaatcgcttccatgcgccgcagtaacaattgctcaagcagatttatcgccagcagctccgaatagcgcccttccccttgcccggcgttaatgatttgcccaaacaggtcgctgaaatgcggctggtgcgcttcatccgggcgaaagaaccccgtattggcaaatattgacggccagttaagccattcatgccagtaggcgcgcggacgaaagtaaacccactggtgataccattcgcgagcctccggatgacgaccgtagtgatgaatctctcctggcgggaacagcaaaatatcacccggtcggcaaacaaattctcgtccctgatttttcaccaccccctgaccgcgaatggtgagattgagaatataacctttcattcccagcggtcggtcgataaaaaaatcgagataaccgttggcctcaatcggcgttaaacccgccaccagatgggcattaaacgagtatcccggcagcaggggatcattttgcgcttcagccatacttttcatactcccgccattcagagaagaaaccaattgtccatattgcatcagacattgccgtcactgcgtcttttactggctcttctcgctaaccaaaccggtaaccccgcttattaaaagcattctgtaacaaagcgggaccaaagccatgacaaaaacgcgtaacaaaagtgtctataatcacggcagaaaagtccacattgattatttgcacggcgtcacactttgctatgccatagcatttttatccataagattagcggatcctacctgacgctttttatcgcaactctctactgtttctccatacccgtttttttgggaattcgagctctaaggaggttataaaaaatggatattaatactgaaactgagatcaagcaaaagcattcactaaccccctttcctgttttcctaatcagcccggcatttcgcgggcgatattttcacagctatttcaggagttcagccatgaacgcttattacattcaggatcgtcttgaggctcagagctgggcgcgtcactaccagcagctcgcccgtgaagagaaagaggcagaactggcagacgacatggaaaaaggcctgccccagcacctgtttgaatcgctatgcatcgatcatttgcaacgccacggggccagcaaaaaatccattacccgtgcgtttgatgacgatgttgagtttcaggagcgcatggcagaacacatccggtacatggttgaaaccattgctcaccaccaggttgatattgattcagaggtataaaacgaatgagtactgcactcgcaacgctggctgggaagctggctgaacgtgtcggcatggattctgtcgacccacaggaactgatcaccactcttcgccagacggcatttaaaggtgatgccagcgatgcgcagttcatcgcattactgatcgttgccaaccagtacggccttaatccgtggacgaaagaaatttacgcctttcctgataagcagaatggcatcgttccggtggtgggcgttgatggctggtcccgcatcatcaatgaaaaccagcagtttgatggcatggactttgagcaggacaatgaatcctgtacatgccggatttaccgcaaggaccgtaatcatccgatctgcgttaccgaatggatggatgaatgccgccgcgaaccattcaaaactcgcgaaggcagagaaatcacggggccgtggcagtcgcatcccaaacggatgttacgtcataaagccatgattcagtgtgcccgtctggccttcggatttgctggtatctatgacaaggatgaagccgagcgcattgtcgaaaatactgcatacactgcagaacgtcagccggaacgcgacatcactccggttaacgatgaaaccatgcaggagattaacactctgctgatcgccctggataaaacatgggatgacgacttattgccgctctgttcccagatatttcgccgcgacattcgtgcatcgtcagaactgacacaggccgaagcagtaaaagctcttggattcctgaaacagaaagccgcagagcagaaggtggcagcatgacaccggacattatcctgcagcgtaccgggatcgatgtgagagctgtcgaacagggggatgatgcgtggcacaaattacggctcggcgtcatcaccgcttcagaagttcacaacgtgatagcaaaaccccgctccggaaagaagtggcctgacatgaaaatgtcctacttccacaccctgcttgctgaggtttgcaccggtgtggctccggaagttaacgctaaagcactggcctggggaaaacagtacgagaacgacgccagaaccctgtttgaattcacttccggcgtgaatgttactgaatccccgatcatctatcgcgacgaaagtatgcgtaccgcctgctctcccgatggtttatgcagtgacggcaacggccttgaactgaaatgcccgtttacctcccgggatttcatgaagttccggctcggtggtttcgaggccataaagtcagcttacatggcccaggtgcagtacagcatgtgggtgacgcgaaaaaatgcctggtactttgccaactatgacccgcgtatgaagcgtgaaggcctgcattatgtcgtgattgagcgggatgaaaagtacatggcgagttttgacgagatcgtgccggagttcatcgaaaaaatggacgaggcactggctgaaattggttttgtatttggggagcaatggcgatgacgcatcctcacgataatatccgggtaggcgcaatcactttcgtctactccgttacaaagcgaggctgggtatttcccggcctttctgttatccgaaatccactgaaagcacagcggctggctgaggagataaataataaacgaggggctgtatgcacaaagcatcttctgttgagttaagaacgagtatcgagatggcacatagccttgctcaaattggaatcaggtttgtgccaataccagtagaaacagacgaagaatccatgggtatggacagttttccctttgatatgtaacggtgaacagttgttctacttttgtttgttagtcttgatgcttcactgatagatacaagagccataagaacctcagatccttccgtatttagccagtatgttctctagtgtggttcgttgtttttgcgtgagccatgagaacgaaccattgagatcatacttactttgcatgtcactcaaaaattttgcctcaaaactggtgagctgaatttttgcagttaaagcatcgtgtagtgtttttcttagtccgttacgtaggtaggaatctgatgtaatggttgttggtattttgtcaccattcatttttatctggttgttctcaagttcggttacgagatccatttgtctatctagttcaacttggaaaatcaacgtatcagtcgggcggcctcgcttatcaaccaccaatttcatattgctgtaagtgtttaaatctttacttattggtttcaaaacccattggttaagccttttaaactcatggtagttattttcaagcattaacatgaacttaaattcatcaaggctaatctctatatttgccttgtgagttttcttttgtgttagttcttttaataaccactcataaatcctcatagagtatttgttttcaaaagacttaacatgttccagattatattttatgaatttttttaactggaaaagataaggcaatatctcttcactaaaaactaattctaatttttcgcttgagaacttggcatagtttgtccactggaaaatctcaaagcctttaaccaaaggattcctgatttccacagttctcgtcatcagctctctggttgctttagctaatacaccataagcattttccctactgatgttcatcatctgagcgtattggttataagtgaacgataccgtccgttctttccttgtagggttttcaatcgtggggttgagtagtgccacacagcataaaattagcttggtttcatgctccgttaagtcatagcgactaatcgctagttcatttgctttgaaaacaactaattcagacatacatctcaattggtctaggtgattttaatcactataccaattgagatgggctagtcaatgataattactagtccttttcctttgagttgtgggtatctgtaaattctgctagacctttgctggaaaacttgtaaattctgctagaccctctgtaaattccgctagacctttgtgtgttttttttgtttatattcaagtggttataatttatagaataaagaaagaataaaaaaagataaaaagaatagatcccagccctgtgtataactcactactttagtcagttccgcagtattacaaaaggatgtcgcaaacgctgtttgctcctctacaaaacagaccttaaaaccctaaaggcttaagtagcaccctcgcaagctcggttgcggccgcaatcgggcaaatcgctgaatattccttttgtctccgaccatcaggcacctgagtcgctgtctttttcgtgacattcagttcgctgcgctcacggctctggcagtgaatgggggtaaatggcactacaggcgccttttatggattcatgcaaggaaactacccataatacaagaaaagcccgtcacgggcttctcagggcgttttatggcgggtctgctatgtggtgctatctgactttttgctgttcagcagttcctgccctctgattttccagtctgaccacttcggattatcccgtgacaggtcattcagactggctaatgcacccagtaaggcagcggtatcatcaacggggtctgacgctcagtggaacgaaaactcacgttaagggattttggtcatgagattatcaaaaaggatcttcacctagatccttttaaattaaaaatgaagttttaaatcaatctaaagtatatatgagtaaacttggtctgacagttaccaatgcttaatcagtgaggcacctatctcagcgatctgtctatttcgttcatccatagttgcctgactccccgtcgtgtagataactacgatacgggagggcttaccatctggccccagtgctgcaatgataccgcgagacccacgctcaccggctccagatttatcagcaataaaccagccagccggaagggccgagcgcagaagtggtcctgcaactttatccgcctccatccagtctattaattgttgccgggaagctagagtaagtagttcgccagttaatagtttgcgcaacgttgttgccattgctacaggcatcgtggtgtcacgctcgtcgtttggtatggcttcattcagctccggttcccaacgatcaaggcgagttacatgatcccccatgttgtgcaaaaaagcggttagctccttcggtcctccgatcgttgtcagaagtaagttggccgcagtgttatcactcatggttatggcagcactgcataattctcttactgtcatgccatccgtaagatgcttttctgtgactggtgagtactcaaccaagtcattctgagaatagtgtatgcggcgaccgagttgctcttgcccggcgtcaatacgggataataccgcgccacatagcagaactttaaaagtgctcatcattggaaaacgttcttcggggcgaaaactctcaaggatcttaccgctgttgagatccagttcgatgtaacccactcgtgcacccaactgatcttcagcatcttttactttcaccagcgtttctgggtgagcaaaaacaggaaggcaaaatgccgcaaaaaagggaataagggcgacacggaaatgttgaatactcatactcttcctttttcaatattattgaagcatttatcagggttattgtctcatgagcggatacatatttgaatgtatttagaaaaataaacaaataggggttccgcgcacatttccccgaaaagtgccacctg

SEQ ID NO: 219 - DNA, 22 bp, synthetic construct
  misc_feature 1..22: note = asd-1 primer
  source 1..22: mol_type = other DNA
ccttcctaacgcaaattccctg

SEQ ID NO: 220 - DNA, 22 bp, synthetic construct
  misc_feature 1..22: note = asd-2 primer
  source 1..22: mol_type = other DNA
ccaatgctctgcttaactcctg

SEQ ID NO: 221 - DNA, 21 bp, synthetic construct
  misc_feature 1..21: note = asd-3 primer
  source 1..21: mol_type = other DNA
gcctcgccatgtttcagtacg

SEQ ID NO: 222 - DNA, 21 bp, synthetic construct
  misc_feature 1..21: note = asd-4 primer
  source 1..21: mol_type = other DNA
ggtctggtgcattccgagtac

SEQ ID NO: 223 - DNA, 23 bp, synthetic construct
  misc_feature 1..23: note = scFv-3 primer
  source 1..23: mol_type = other DNA
cataatctgggtccttggtctgc

SEQ ID NO: 224 - DNA, 5728 bp, synthetic construct
  misc_feature 1..5728: note = pJW168 plasmid
  source 1..5728: mol_type = other DNA
ttactaatcgccatcttccagcaggcgcaccattgcccctgtttcactatccaggttacggatatagttcatgacaatatttacattggtccagccaccagcttgcatgatctccggtattgaaactccagcgcgggccatatctcgcgcggctccgacacgggcactgtgtccagaccaggccaggtatctctgaccagagtcatccttagcgccgtaaatcaatcgatgagttgcttcaaaaatcccttccagggcgcgagttgatagctggctggtggcagatggcgcggcaacaccattttttctgacccggcaaaacaggtagttattcggatcatcagctacaccagagacggaaatccatcgctcgaccagtttagttacccccaggctaagtgccttctctacacctgcggtgctaaccagcgttttcgttctgccaatatggattaacattctcccaccgtcagtacgtgagatatctttaaccctgatcctggcaatttcggctatacgtaacagggtgttataagcaatccccagaaatgccagattacgtatatcctggcagcgatcgctattttccatgagtgaacgaacctggtcgaaatcagtgcgttcgaacgctagagcctgttttgcacgttcaccggcatcaacgttttcttttcggatccgccgcataaccagtgaaacagcattgctgtcacttggtcgtggcagcccggaccgacgatgaagcatgtttagctggcccaaatgttgctggatagtttttactgccagaccgcgcgcctgaagatatagaagataatcgcgaacatcttcaggttctgcgggaaaccatttccggttattcaacttgcaccatgccgcccacgaccggcaaacggacagaagcattttccaggtatgctcagaaaacgcctggcgatccctgaacatgtccatcaggttcttgcgaacctcatcactcgttgcatcgaccggtaatgcaggcaaattttggtgtacgggcagtaaattggacatgtcaacggtacctgcagtctagagtcgaggcctgtttcctgtgtgaaattgttatccgctcacaattccacacattatacgagccggaagcataaagtgtaaagcctggggtgcctaatgagtgagctgtttcctgtgtgaaattgttatccgctcacaattccacacattatacgagccggaagcataaagtgtaaagcctggggtgcctaatgagtgagctgcctcgcgcgtttcggtgatgacggtgaaaacctctgacacatgcagctcccggagacggtcacagcttgtctgtaagcggatgccgggagcagacaagcccgtcagggcgcgtcagcgggtgttggcgggtgtcggggcgcagccatgacccagtcacgtagcgatagacggagtgtatccgacaccatcgaatggtgcaaaacctttcgcggtatggcatgatagcgcccggaagagagtcaattcagggtggtgaatgtgaaaccagtaacgttatacgatgtcgcagagtatgccggtgtctcttatcagaccgtttcccgcgtggtgaaccaggccagccacgtttctgcgaaaacgcgggaaaaagtggaagcggcgatggcggagctgaattacattcccaaccgcgtggcacaacaactggcgggcaaacagtcgttgctgattggcgttgccacctccagtctggccctgcacgcgccgtcgcaaattgtcgcggcgattaaatctcgcgccgatcaactgggtgccagcgtggtggtgtcgatggtagaacgaagcggcgtcgaagcctgtaaagcggcggtgcacaatcttctcgcgcaacgcgtcagtgggctgatcattaactatccgctggatgaccaggatgccattgctgtggaagctgcctgcactaatgttccggcgttatttcttgatgtctctgaccagacacccatcaacagtattattttctcccatgaagacggtacgcgactgggcgtggagcatctggtcgcattgggtcaccagcaaatcgcgctgttagcgggcccattaagttctgtctcggcgcgtctgcgtctggctggctggcataaatatctcactcgcaatcaaattcagccgatagcggaacgggaaggcgactggagtgccatgtccggttttcaacaaaccatgcaaatgctgaatgagggcatcgttcccactgcgatgctggttgccaacgatcagatggcgctgggcgcaatgcgcgccattaccgagtccgggctgcgcgttggtgcggatatctcggtagtgggatacgacgataccgaagacagctcatgttatatcccgccgttaaccaccatcaaacaggattttcgcctgctggggcaaaccagcgtggaccgcttgctgcaactctctcagggccaggcggtgaagggcaatcagctgttgcccgtctcactggtgaaaagaaaaaccaccctggcgcccaatacgcaaaccgcctctccccgcgcgttggccgattcattaatgcagctggcacgacaggtttcccgactggaaagcgggcagtgagcgcaacgcaatcaatgtgagttagctcactcattaggcaccccaggctttacactttatgcttccgaccatactggcttaactatgcggcatcagagcagattgtactgagagtgcaccatcgatgcaggtggcacttttcggggaaatgtgcgcggaacccctatttgtttatttttctaaatacattcaaatatgtatccgctcatgagacaataaccctgataaatgcttcaataatattgaaaaaggaagagtatgagtattcaacatttccgtgtcgcccttattcccttttttgcggcattttgccttcctgtttttgctcacccagaaacgctggtgaaagtaaaagatgctgaagatcagttgggtgcacgagtgggttacatcgaactggatctcaacagcggtaagatccttgagagttttcgccccgaagaacgttttccaatgatgagcacttttaaagttctgctatgtggcgcggtattatcccgtattgacgccgggcaagagcaactcggtcgccgcatacactattctcagaatgacttggttgagtactcaccagtcacagaaaagcatcttacggatggcatgacagtaagagaattatgcagtgctgccataaccatgagtgataacactgcggccaacttacttctgacaacgatcggaggaccgaaggagctaaccgcttttttgcacaacatgggggatcatgtaactcgccttgatcgttgggaaccggagctgaatgaagccataccaaacgacgagcgtgacaccacgatgcctgtagcaatggcaacaacgttgcgcaaactattaactggcgaactacttactctagcttcccggcaacaattaatagactggatggaggcggataaagttgcaggaccacttctgcgctcggcccttccggctggctggtttattgctgataaatctggagccggtgagcgtgggtctcgcggtatcattgcagcactggggccagatggtaagccctcccgtatcgtagttatctacacgacggggagtcaggcaactatggatgaacgaaatagacagatcgctgagataggtgcctcactgattaagcattggtaactgtcagaccaagtttactcatatatactttagattgatttaaaacttcatttttaatttaaaaggatctaggtgaagatcctttttgataatctcatgaccaaaatcccttaacgtgagttttcgttccactgagcgtcagaccccgttgatgataccgctgccttactgggtgcattagccagtctgaatgacctgtcacgggataatccgaagtggtcagactggaaaatcagagggcaggaactgctgaacagcaaaaagtcagatagcaccacatagcagacccgccataaaacgccctgagaagcccgtgacgggcttttcttgtattatgggtagtttccttgcatgaatccataaaaggcgcctgtagtgccatttacccccattcactgccagagccgtgagcgcagcgaactgaatgtcacgaaaaagacagcgactcaggtgcctgatggtcggagacaaaaggaatattcagcgatttgcccgattgcggccgcaaccgagcttgcgagggtgctacttaagcctttagggttttaaggtctgttttgtagaggagcaaacagcgtttgcgacatccttttgtaatactgcggaactgactaaagtagtgagttatacacagggctgggatctattctttttatctttttttattctttctttattctataaattataaccacttgaatataaacaaaaaaaacacacaaaggtctagcggaatttacagagggtctagcagaatttacaagttttccagcaaaggtctagcagaatttacagatacccacaactcaaaggaaaaggactagtaattatcattgactagcccatctcaattggtatagtgattaaaatcacctagaccaattgagatgtatgtctgaattagttgttttcaaagcaaatgaactagcgattagtcgctatgacttaacggagcatgaaaccaagctaattttatgctgtgtggcactactcaaccccacgattgaaaaccctacaaggaaagaacggacggtatcgttcacttataaccaatacgttcagatgatgaacatcagtagggaaaatgcttatggtgtattagctaaagcaaccagagagctgatgacgagaactgtggaaatcaggaatcctttggttaaaggctttgagattttccagtggacaaactatgccaagttctcaagcgaaaaattagaattagtttttagtgaagagatattgccttatcttttccagttaaaaaaattcataaaatataatctggaacatgttaagtcttttgaaaacaaatactctatgaggatttatgagtggttattaaaagaactaacacaaaagaaaactcacaaggcaaatatagagattagccttgatgaatttaagttcatgttaatgcttgaaaataactaccatgagtttaaaaggcttaaccaatgggttttgaaaccaataagtaaagatttaaacacttacagcaatatgaaattggtggttgataagcgaggccgcccgactgatacgttgattttccaagttgaactagatagacaaatggatctcgtaaccgaacttgagaacaaccagataaaaatgaatggtgacaaaataccaacaaccattacatcagattcctacctacataacggactaagaaaaacactacacgatgctttaactgcaaaaattcagctcaccagttttgaggcaaaatttttgagtgacatgcaaagtaagyatgatctcaatggttcgttctcatggctcacgcaaaaacaacgaaccacactagagaacatactggctaaatacggaaggatctgaggttcttatggctcttgtatctatcagtgaagcatcaagactaacaaacaaaagtagaacaactgttcaccgttacatatcaaagggaaaactgtccatacccatgggctagctgatcagccagtgccaagcttgctcaatcaatcaccggatcccccgggaattc

SEQ ID NO: 225 - DNA, 3736 bp, synthetic construct
  misc_feature 1..3736: note = pATIU6 plasmid
  source 1..3736: mol_type = other DNA
gcgcccaatacgcaaaccgcctctccccgcgcgttggccgattcattaatgcagctggcacgacaggtttcccgactggaaagcgggcagtgagcgcaacgcaatggatccaaggtcgggcaggaagagggcctatttcccatgattccttcatatttgcatatacgatacaaggctgttagagagataattagaattaatttgactgtaaacacaaagatattagtacaaaatacgtgacgtagaaagtaataatttcttgggtagtttgcagttttaaaattatgttttaaaatggactatcatatgcttaccgtaacttgaaagtatttcgatttcttggctttatatatcttgtggaaaggacgaaactagttttttctcgagtagctagagaattcttaagccagccccgacacccgccaacacccgctgacgcgccctgacgggcttgtctgctcccggcatccgcttacagacaagctgtgaccgtctccgggagctgcatgtgtcagaggttttcaccgtcatcaccgaaacgcgcgagacgaaagggcctcgtgatacgcctatttttataggttaatgtcatgataataatggtttcttagacgtcaggtggcacttttcggggaaatgtgaagcttcgcggaacccctatttgtttatttttctaaatacattcaaatatgtatccgctcatgagacaataaccctgataaatgcttcaataatattgaaaaaggaagagtatgagtattcaacatttccgtgtcgcccttattcccttttttgcggcattttgccttcctgtttttgctcacccagaaacgctggtgaaagtaaaagatgctgaagatcagttgggtgcacgagtgggttacatcgaactggatctcaacagcggtaagatccttgagagttttcgccccgaagaacgttttccaatgatgagcacttttaaagttctgctatgtggcgcggtattatcccgtattgacgccgggcaagagcaactcggtcgccgcatacactattctcagaatgacttggttgagtactcaccagtcacagaaaagcatcttacggatggcatgacagtaagagaattatgcagtgctgccataaccatgagtgataacactgcggccaacttacttctgacaacgatcggaggaccgaaggagctaaccgcttttttgcacaacatgggggatcatgtaactcgccttgatcgttgggaaccggagctgaatgaagccataccaaacgacgagcgtgacaccacgatgcctgtagcaatggcaacaacgttgcgcaaactattaactggcgaactacttactctagcttcccggcaacaattaatagactggatggaggcggataaagttgcaggaccacttctgcgctcggcccttccggctggctggtttattgctgataaatctggagccggtgagcgtgggtctcgcggtatcattgcagcactggggccagatggtaagccctcccgtatcgtagttatctacacgacggggagtcaggcaactatggatgaacgaaatagacagatcgctgagataggtgcctcactgattaagcattggtaaaagcttctgtcagaccaagtttactcatatatactttagattgatttaaaacttcatttttaatttaaaaggatctaggtgaagatcctttatggtgaaggatgcgccacaggatactggcgcgcatacacagcacatctctttgcaggaaaaaaacgctatgaaaaatgttggttttatcggctggcgcggaatggtcggctctgttctcatgcaacgcatggtagaggagcgcgatttcgacgctattcgccctgttttcttttctacctcccagtttggacaggcggcgcccaccttcggcgacacctccaccggcacgctacaggacgcttttgatctggatgcgctaaaagcgctcgatatcatcgtgacctgccagggcggcgattataccaacgaaatttatccaaagctgcgcgaaagcggatggcagggttactggattgatgcggcttctacgctgcgcatgaaagatgatgccattattattctcgacccggtcaaccaggacgtgattaccgacggcctgaacaatggcgtgaagacctttgtgggcggtaactgtaccgttagcctgatgttgatgtcgctgggcggtctctttgcccataatctcgttgactgggtatccgtcgcgacctatcaggccgcctccggcggcggcgcgcgccatatgcgcgagctgttaacccagatgggtcagttgtatggccatgtcgccgatgaactggcgacgccgtcttccgcaattcttgatattgaacgcaaagttacggcattgacccgcagcggcgagctgccggttgataactttggcgtaccgctggcgggaagcctgatcccctggatcgacaaacagctcgataacggccagagccgcgaagagtggaaaggccaggcggaaaccaacaagattctcaatactgcctctgtgattccggttgatggtttgtgtgtgcgcgtcggcgcgctgcgctgtcacagccaggcgttcaccatcaagctgaaaaaagaggtatccattccgacggtggaagaactgctggcggcacataatccgtgggcgaaagtggtgccgaacgatcgtgatatcactatgcgcgaattaaccccggcggcggtgaccggcacgttgactacgccggttggtcgtctgcgtaagctgaacatggggccagagttcttgtcggcgtttaccgtaggcgaccagttgttatggggcgccgccgagccgctgcgtcgaatgctgcgccagttggcgtagttgataatctcatgaccaaaatcccttaacgtgagttttcgttccactgagcgtcagaccccgtagaaaagatcaaaggatcttcttgagatcctttttttctgcgcgtaatctgctgcttgcaaacaaaaaaaccaccgctaccagcggtggtttgtttgccggatcaagagctaccaactctttttccgaaggtaactggcttcagcagagcgcagataccaaatactgttcttctagtgtagccgtagttaggccaccacttcaagaactctgtagcaccgcctacatacctcgctctgctaatcctgttaccagtggctgctgccagtggcgataagtcgtgtcttaccgggttggactcaagacgatagttaccggataaggcgcagcggtcgggctgaacggggggttcgtgcacacagcccagcttggagcgaacgacctacaccgaactgagatacctacagcgtgagctatgagaaagcgccacgcttcccgaagggagaaaggcggacaggtatccggtaagcggcagggtcggaacaggagagcgcacgagggagcttccagggggaaacgcctggtatctttatagtcctgtcgggtttcgccacctctgacttgagcgtcgatttttgtgatgctcgtcaggggggcggagcctatggaaaaacgccagcaacgcggcctttttacggttcctggccttttgctggccttttgctcacatgttctttcctgcgttatcccctgattctgtggataaccgtattaccgcctttgagtgagctgataccgctcgccgcagccgaacgaccgagcgcagcgagtcagtgagcgaggaagcggaaga

SEQ ID NO: 226 - DNA, 26 bp, synthetic construct
  misc_feature 1..26: note = APR-001 Kan PrimerF
  source 1..26: mol_type = other DNA
aaaaaagcttgcagctctggcccgtg

SEQ ID NO: 227 - DNA, 38 bp, synthetic construct
  misc_feature 1..38: note = APR-002 Kan PrimerR
  source 1..38: mol_type = other DNA
aaaaaagcttttagaaaaactcatcgagcatcaaatga

SEQ ID NO: 228 - DNA, 28 bp, synthetic construct
  misc_feature 1..28: note = APR-003 pATI ori T148CF
  source 1..28: mol_type = other DNA
acactagaaggacagtatttggtatctg

SEQ ID NO: 229 - DNA, 18 bp, synthetic construct
  source 1..18: mol_type = other DNA
agccgtagttaggccacc

SEQ ID NO: 230 - DNA, 3203 bp, synthetic construct
  misc_feature 1..3203: note = pSL0147 plasmid
  source 1..3203: mol_type = other DNA
gacgaaagggcctcgtgatacgcctatttttataggttaatgtcatgataataatggtttcttagacgtcaggtggcacttttcggggaaatgtgcgcggaacccctatttgtttatttttctaaatacattcaaatatgtatccgctcatgagacaataaccctgataaatgcttcaataatattgaaaaaggaagagtatgagtattcaacatttccgtgtcgcccttattcccttttttgcggcattttgccttcctgtttttgctcacccagaaacgctggtgaaagtaaaagatgctgaagatcagttgggtgcacgagtgggttacatcgaactggatctcaacagcggtaagatccttgagagttttcgccccgaagaacgttttccaatgatgagcacttttaaagttctgctatgtggcgcggtattatcccgtattgacgccgggcaagagcaactcggtcgccgcatacactattctcagaatgacttggttgagtactcaccagtcacagaaaagcatcttacggatggcatgacagtaagagaattatgcagtgctgccataaccatgagtgataacactgcggccaacttacttctgacaacgatcggaggaccgaaggagctaaccgcttttttgcacaacatgggggatcatgtaactcgccttgatcgttgggaaccggagctgaatgaagccataccaaacgacgagcgtgacaccacgatgcctgtagcaatggcaacaacgttgcgcaaactattaactggcgaactacttactctagcttcccggcaacaattaatagactggatggaggcggataaagttgcaggaccacttctgcgctcggcccttccggctggctggtttattgctgataaatctggagccggtgagcgtgggtctcgcggtatcattgcagcactggggccagatggtaagccctcccgtatcgtagttatctacacgacggggagtcaggcaactatggatgaacgaaatagacagatcgctgagataggtgcctcactgattaagcattggtaactgtcagaccaagtttactcatatatactttagattgatttaaaacttcatttttaatttaaaaggatctaggtgaagatcctttttgataatctcatgaccaaaatcccttaacgtgagttttcgttccactgagcgtcagaccccgtagaaaagatcaaaggatcttcttgagatcctttttttctgcgcgtaatctgctgcttgcaaacaaaaaaaccaccgctaccagcggtggtttgtttgccggatcaagagctaccaactctttttccgaaggtaactggcttcagcagagcgcagataccaaatactgttcttctagtgtagccgtagttaggccaccacttcaagaactctgtagcaccgcctacatacctcgctctgctaatcctgttaccagtggctgctgccagtggcgataagtcgtgtcttaccgggttggactcaagacgatagttaccggataaggcgcagcggtcgggctgaacggggggttcgtgcacacagcccagcttggagcgaacgacctacaccgaactgagatacctacagcgtgagctatgagaaagcgccacgcttcccgaagggagaaaggcggacaggtatccggtaagcggcagggtcggaacaggagagcgcacgagggagcttccagggggaaacgcctggtatctttatagtcctgtcgggtttcgccacctctgacttgagcgtcgatttttgtgatgctcgtcaggggggcggagcctatggaaaaacgccagcaacgcggcctttttacggttcctggccttttgctggccttttgctcacatgttctttcctgcgttatcccctgattctgtggataaccgtattaccgcctttgagtgagctgataccgctcgccgcagccgaacgaccgagcgcagcgagtcagtgagcgaggaagcggaagagcgcccaatacgcaaaccgcctctccccgcgcgttggccgattcattaatgcagctggcacgacaggtttcccgactggaaagcgggcagtgagcgcaacgcaattaatgtgagttagctcactcattaggcaccccaggctttacactttatgcttccggctcgtatgttgtgtggaattgtgagcggataacaatttcacacaggaaacagctatgaccatgattacgccaagctcggcgcgccattgggatggaacgcgttatcggcaatctggaggcaaagtttaatgataattttgcaaaaataatgcgcggaataatgatgcataaagcggctatttcgccgcctaagaaaaagatcgggggaagtgaaaaattttctaaagttcgaaattcaggtgccgatacaagggttacggtgagaaaccgtgggcaacagcccaataacatcaagttgtaattgataaggaaaagatcatgggctagcctcaataagcttcttgcctttctgcagaccaaggacccagattatgttgcagcaggccggtacctccgttctggcgcaggcgaaccaggttccgcaaaacgtcctctctttactgcgttaatccggcgattgattcaccgacacgtggtacacaatcaaggcagcgaaagctgccttttttaattccggagcctgtgtaatgaaagaaatcaccgtcactgaacctgcctttgtcacccgcttttcctgttctggctcggcctgtcgcgaccactgttgtaagggctggaaagttccatcccaatacgcgtcaattcactggccgtcgttttacaacgtcgtgactgggaaaaccctggcgttacccaacttaatcgccttgcagcacatccccctttcgccagctggcgtaatagcgaagaggcccgcaccgatcgcccttcccaacagttgcgcagcctgaatggcgaatggcgcctgatgcggtattttctccttacgcatctgtgcggtatttcacaccgcatatggtgcactctcagtacaatctgctctgatgccgcatagttaagccagccccgacacccgccaacacccgctgacgcgccctgacgggcttgtctgctcccggcatccgcttacagacaagctgtgaccgtctccgggagctgcatgtgtcagaggttttcaccgtcatcaccgaaacgcgcga

SEQ ID NO: 231 - DNA, 3196 bp, synthetic construct
  misc_feature 1..3196: note = pSL0148 plasmid
  source 1..3196: mol_type = other DNA
gacgaaagggcctcgtgatacgcctatttttataggttaatgtcatgataataatggtttcttagacgtcaggtggcacttttcggggaaatgtgcgcggaacccctatttgtttatttttctaaatacattcaaatatgtatccgctcatgagacaataaccctgataaatgcttcaataatattgaaaaaggaagagtatgagtattcaacatttccgtgtcgcccttattcccttttttgcggcattttgccttcctgtttttgctcacccagaaacgctggtgaaagtaaaagatgctgaagatcagttgggtgcacgagtgggttacatcgaactggatctcaacagcggtaagatccttgagagttttcgccccgaagaacgttttccaatgatgagcacttttaaagttctgctatgtggcgcggtattatcccgtattgacgccgggcaagagcaactcggtcgccgcatacactattctcagaatgacttggttgagtactcaccagtcacagaaaagcatcttacggatggcatgacagtaagagaattatgcagtgctgccataaccatgagtgataacactgcggccaacttacttctgacaacgatcggaggaccgaaggagctaaccgcttttttgcacaacatgggggatcatgtaactcgccttgatcgttgggaaccggagctgaatgaagccataccaaacgacgagcgtgacaccacgatgcctgtagcaatggcaacaacgttgcgcaaactattaactggcgaactacttactctagcttcccggcaacaattaatagactggatggaggcggataaagttgcaggaccacttctgcgctcggcccttccggctggctggtttattgctgataaatctggagccggtgagcgtgggtctcgcggtatcattgcagcactggggccagatggtaagccctcccgtatcgtagttatctacacgacggggagtcaggcaactatggatgaacgaaatagacagatcgctgagataggtgcctcactgattaagcattggtaactgtcagaccaagtttactcatatatactttagattgatttaaaacttcatttttaatttaaaaggatctaggtgaagatcctttttgataatctcatgaccaaaatcccttaacgtgagttttcgttccactgagcgtcagaccccgtagaaaagatcaaaggatcttcttgagatcctttttttctgcgcgtaatctgctgcttgcaaacaaaaaaaccaccgctaccagcggtggtttgtttgccggatcaagagctaccaactctttttccgaaggtaactggcttcagcagagcgcagataccaaatactgttcttctagtgtagccgtagttaggccaccacttcaagaactctgtagcaccgcctacatacctcgctctgctaatcctgttaccagtggctgctgccagtggcgataagtcgtgtcttaccgggttggactcaagacgatagttaccggataaggcgcagcggtcgggctgaacggggggttcgtgcacacagcccagcttggagcgaacgacctacaccgaactgagatacctacagcgtgagctatgagaaagcgccacgcttcccgaagggagaaaggcggacaggtatccggtaagcggcagggtcggaacaggagagcgcacgagggagcttccagggggaaacgcctggtatctttatagtcctgtcgggtttcgccacctctgacttgagcgtcgatttttgtgatgctcgtcaggggggcggagcctatggaaaaacgccagcaacgcggcctttttacggttcctggccttttgctggccttttgctcacatgttctttcctgcgttatcccctgattctgtggataaccgtattaccgcctttgagtgagctgataccgctcgccgcagccgaacgaccgagcgcagcgagtcagtgagcgaggaagcggaagagcgcccaatacgcaaaccgcctctccccgcgcgttggccgattcattaatgcagctggcacgacaggtttcccgactggaaagcgggcagtgagcgcaacgcaattaatgtgagttagctcactcattaggcaccccaggctttacactttatgcttccggctcgtatgttgtgtggaattgtgagcggataacaatttcacacaggaaacagctatgaccatgattacgccaagctcggcgcgccattgggatggaacttccagacgacaagagtatcgcctttatttacatactttaacgctcgtttcaggccggggcggtttgcaatcttgccactgatacggtcctcaaaaatgcggtcacaatttgcactagtaagcgcattacgctgtaaatcgatattttggtcaattgttgacacccgaatatacccaatagtagccatgattttctcctttacatcagataaggaagaattttagtcgcttttctcatggaggattgctgctagcctcaataagcttcttgcctttctgcagaccaaggacccagattatgtatggaatgtatggctgtaaatgatatttcctacgggcgagaagctgaaatatggccgcgggattattctatgcttgctcgtcgagttcaatttctacgttttaatgatatccctgttcgattggtgagtaataatgcccggataatcacaggctacattgcgaagtttaatccgaaggaaaatttgattctggcttcggataaacctaaaggagttccatcccaatacgcgtcaattcactggccgtcgttttacaacgtcgtgactgggaaaaccctggcgttacccaacttaatcgccttgcagcacatccccctttcgccagctggcgtaatagcgaagaggcccgcaccgatcgcccttcccaacagttgcgcagcctgaatggcgaatggcgcctgatgcggtattttctccttacgcatctgtgcggtatttcacaccgcatatggtgcactctcagtacaatctgctctgatgccgcatagttaagccagccccgacacccgccaacacccgctgacgcgccctgacgggcttgtctgctcccggcatccgcttacagacaagctgtgaccgtctccgggagctgcatgtgtcagaggttttcaccgtcatcaccgaaacgcgcga

SEQ ID NO: 232 - DNA, 21 bp, synthetic construct
  misc_feature 1..21: note = flic-1 primer
  source 1..21: mol_type = other DNA
cgttatcggcaatctggaggc

SEQ ID NO: 233 - DNA, 21 bp, synthetic construct
  misc_feature 1..21: note = flic-2 primer
  source 1..21: mol_type = other DNA
ccagcccttacaacagtggtc

SEQ ID NO: 234 - DNA, 24 bp, synthetic construct
  misc_feature 1..24: note = flic-3 primer
  source 1..24: mol_type = other DNA
gtctgtcaacaactggtctaacgg

SEQ ID NO: 235 - DNA, 23 bp, synthetic construct
  misc_feature 1..23: note = flic-4 primer
  source 1..23: mol_type = other DNA
agacggtcctcatccagataagg

SEQ ID NO: 236 - DNA, 22 bp, synthetic construct
  misc_feature 1..22: note = fljb-1 primer sequence
  source 1..22: mol_type = other DNA
ttccagacgacaagagtatcgc

SEQ ID NO: 237 - DNA, 27 bp, synthetic construct
  misc_feature 1..27: note = fljb-2 primer
  source 1..27: mol_type = other DNA
cctttaggtttatccgaagccagaatc

SEQ ID NO: 238 - DNA, 20 bp, synthetic construct
  misc_feature 1..20: note = fljb-3 primer
  source 1..20: mol_type = other DNA
caccaggtttttcacgctgc

SEQ ID NO: 239 - DNA, 20 bp, synthetic construct
  misc_feature 1..20: note = fljb-4 primer
  source 1..20: mol_type = other DNA
acacgcatttacgcctgtcg

SEQ ID NO: 240 - DNA, 1518 bp, synthetic construct
  misc_feature 1..1518: note = cytoLLO ORF
  source 1..1518: mol_type = other DNA
atgaaagacgcctccgcgtttaacaaggagaactccatcagctccatggccccgcccgcttccccgccggcgagccctaaaaccccgatcgagaaaaagcacgccgacgagattgacaaatatattcaaggtttagactacaataagaacaacgtgctggtgtatcacggcgatgcggtgaccaatgttccgccgcgcaagggctacaaagatggtaacgaatatatcgtggttgagaaaaagaaaaaaagcatcaaccagaacaacgccgatatccaagttgtgaacgccatcagctctttaacctatccgggcgcgctggtgaaagccaacagcgaactggtggaaaaccagcccgatgtgctgccggtgaaacgcgattctttaacgctgagcattgatttaccgggcatgacgaaccaagataacaaaatcgtggtgaagaacgcgaccaagtccaacgtgaacaacgcggtgaacacgctggtggaacgctggaacgaaaaatacgcccaagcttacccgaacgtgagcgcgaagattgactacgacgacgaaatggcctacagcgagagccagctgatcgcgaaattcggcaccgcgttcaaagcggtgaacaactctttaaacgtgaactttggcgcgatcagcgaaggcaaaatgcaagaagaggtgatcagctttaaacaaatctattataacgtgaatgttaacgagccgacgcgtccgagccgctttttcggcaaagcggtgacgaaggaacagctgcaagcgcttggcgtgaacgcggaaaaccctccggcctatatttccagcgtggcgtatggccgccaagtttatctgaagctgagcacgaacagccacagcaccaaagttaaggcggcctttgatgcggcggtgagcggcaaaagcgttagcggcgacgttgagctgacgaacatcatcaagaacagctcctttaaagcggtgatctatggcggtagcgcgaaagacgaagtgcagatcatcgacggcaatttaggtgatctgcgcgatattttaaaaaagggcgccaccttcaaccgtgagacgcccggtgtgccgatcgcctacaccaccaactttttaaaggataacgagctggccgtgatcaaaaacaattccgaatatatcgaaaccacgagcaaggcgtataccgatggcaagatcaacattgaccacagcggtggctatgtggcgcagttcaacatcagctgggatgaagtgaactatgatccggagggcaacgagatcgtgcagcacaagaactggtccgagaacaacaaatccaagctggcgcatttcaccagcagcatctatctgccgggcaacgcgcgcaacattaatgtgtacgcgaaagagtgcacgggtcttgcgtgggaatggtggcgcaccgtgatcgatgatcgcaatttaccgctggtgaaaaaccgcaacatctccatctggggcaccactttatacccgaaatattccaacaaagttgataaccctattgag

SEQ ID NO: 241 - DNA, 45 bp, synthetic construct
  misc_feature 1..45: note = LLO promoter
  source 1..45: mol_type = other DNA
attatgtcttgacatgtagtgagtgggctggtataatgcagcaag

SEQ ID NO: 242 - DNA, 1176 bp, synthetic construct
  misc_feature 1..1176: note = Asd Gene ORF
  source 1..1176: mol_type = other DNA
ctacgccaactggcgcagcattcgacgcagcggctcggcggcgccccataacaactggtcgcctacggtaaacgccgacaagaactctggccccatgttcagcttacgcagacgaccaaccggcgtagtcaacgtgccggtcaccgccgccggggttaattcgcgcatagtgatatcacgatcgttcggcaccactttcgcccacggattatgtgccgccagcagttcttccaccgtcggaatggatacctcttttttcagcttgatggtgaacgcctggctgtgacagcgcagcgcgccgacgcgcacacacaaaccatcaaccggaatcacagaggcagtattgagaatcttgttggtttccgcctggcctttccactcttcgcggctctggccgttatcgagctgtttgtcgatccaggggatcaggcttcccgccagcggtacgccaaagttatcaaccggcagctcgccgctgcgggtcaatgccgtaactttgcgttcaatatcaagaattgcggaagacggcgtcgccagttcatcggcgacatggccatacaactgacccatctgggttaacagctcgcgcatatggcgcgcgccgccgccggaggcggcctgataggtcgcgacggatacccagtcaacgagattatgggcaaagagaccgcccagcgacatcaacatcaggctaacggtacagttaccgcccacaaaggtcttcacgccattgttcaggccgtcggtaatcacgtcctggttgaccgggtcgagaataataatggcatcatctttcatgcgcagcgtagaagccgcatcaatccagtaaccctgccatccgctttcgcgcagctttggataaatttcgttggtataatcgccgccctggcaggtcacgatgatatcgagcgcttttagcgcatccagatcaaaagcgtcctgtagcgtgccggtggaggtgtcgccgaaggtgggcgccgcctgtccaaactgggaggtagaaaagaaaacagggcgaatagcgtcgaaatcgcgctcctctaccatgcgttgcatgagaacagagccgaccattccgcgccagccgataaaaccaacatttttcatagcgtttttttcctgcaaagagatgtgctgtgtatgcgcgccagtatcctgtggcgcatccttcaccat

SEQ ID NO: 243 - DNA, 589 bp, synthetic construct
  misc_feature 1..589: note = pBR322 Origin
  source 1..589: mol_type = other DNA
ttgagatcctttttttctgcgcgtaatctgctgcttgcaaacaaaaaaaccaccgctaccagcggtggtttgtttgccggatcaagagctaccaactctttttccgaaggtaactggcttcagcagagcgcagataccaaatactgtccttctagtgtagccgtagttaggccaccacttcaagaactctgtagcaccgcctacatacctcgctctgctaatcctgttaccagtggctgctgccagtggcgataagtcgtgtcttaccgggttggactcaagacgatagttaccggataaggcgcagcggtcgggctgaacggggggttcgtgcacacagcccagcttggagcgaacgacctacaccgaactgagatacctacagcgtgagctatgagaaagcgccacgcttcccgaagggagaaaggcggacaggtatccggtaagcggcagggtcggaacaggagagcgcacgagggagcttccagggggaaacgcctggtatctttatagtcctgtcgggtttcgccacctctgacttgagcgtcgatttttgtgatgctcgtcaggggggcggagcctatggaaa

SEQ ID NO: 244 - DNA, 3269 bp, synthetic construct
  misc_feature 1..3269: note = pEQU6 shSCR
  source 1..3269: mol_type = other DNA
ctttcctgcgttatcccctgattctgtggataaccgtattaccgcctttgagtgagctgataccgctcgccgcagccgaacgaccgagcgcagcgagtcagtgagcgaggaagcggaagagcgcccaatacgcaaaccgcctctccccgcgcgttggccgattcattaatgcagctggcacgacaggtttcccgactggaaagcgggcagtgagcgcaacgcaattaatacgcgtaccgctagccaggaagagtttgtagaaacgcaaaaaggccatccgtcaggatggccttctgcttagtttgatgcctggcagtttatggcgggcgtcctgcccgccaccctccgggccgttgcttcacaacgttcaaatccgctcccggcggatttgtcctactcaggagagcgttcaccgacaaacaacagataaaacgaaaggcccagtcttccgactgagcctttcgttttatttgatgcctggcagttccctactctcgcgttaacgctagcatggatgttttcccagtcacgacgttgtaaaacgacggccagtcttaagctcgggccccaaataatgattttattttgactgatagtgacctgttcgttgcaacaaattgatgagcaatgcttttttataatgccaactttgtacaaaaaagcaggctttaaaggaaccaattcagtcgactggatccaaggtcgggcaggaagagggcctatttcccatgattccttcatatttgcatatacgatacaaggctgttagagagataattagaattaatttgactgtaaacacaaagatattagtacaaaatacgtgacgtagaaagtaataatttcttgggtagtttgcagttttaaaattatgttttaaaatggactatcatatgcttaccgtaacttgaaagtatttcgatttcttggctttatatatcttgtggaaaggacgaaactagcaacaagatgaagagcaccaattctagagattggtgctcttcatcttgttgttttttcgagtagctagagaattcatggtaatagcgatgactaatacgtagatgtactgccaagtaggaaagtcccataaggtcatgtactgggcataatgccaggcgggccatttaccgtcattgacgtcaatagggggcgtacttggcatatgatacacttgatgtactgccaagtgggcagtttaccgtaaatagtccacccattgacgtcaatggaaagtccctattggcgttactatgggaacatacgtcattattgacgtcaatgggcgggggtcgttgggcggtcagccaggcgggccatttaccgtaagttatgtaacgcggaactccatatatgggctatgaactaatgaccccgtaattgattactattaataactagacccagctttcttgtacaaagttggcattataagaaagcattgcttatcaatttgttgcaacgaacaggtcactatcagtcaaaataaaatcattatttgccatccagctgatatcccctatagtgagtcgtattacatggtcatagctgtttcctggcagctctggcccgtgtctcaaaatctctgatgttacattgcacaagataaaaatatatcatcatgaacaataaaactgtctgcttacataaacagtaatacaaggggtgttatgagccatattcaacgggaaacgtcgaggccgcgattaaattccaacatggatgctgatttatatgggtataaatgggctcgcgataatgtcgggcaatcaggtgcgacaatctatcgcttgtatgggaagcccgatgcgccagagttgtttctgaaacatggcaaaggtagcgttgccaatgatgttacagatgagatggtcagactaaactggctgacggaatttatgcctcttccgaccatcaagcattttatccgtactcctgatgatgcatggttactcaccactgcgatccccggaaaaacagcattccaggtattagaagaatatcctgattcaggtgaaaatattgttgatgcgctggcagtgttcctgcgccggttgcattcgattcctgtttgtaattgtccttttaacagcgatcgcgtatttcgtctcgctcaggcgcaatcacgaatgaataacggtttggttgatgcgagtgattttgatgacgagcgtaatggctggcctgttgaacaagtctggaaagaaatgcataaacttttgccattctcaccggattcagtcgtcactcatggtgatttctcacttgataaccttatttttgacgaggggaaattaataggttgtattgatgttggacgagtcggaatcgcagaccgataccaggatcttgccatcctatggaactgcctcggtgagttttctccttcattacagaaacggctttttcaaaaatatggtattgataatcctgatatgaataaattgcagtttcatttgatgctcgatgagtttttctaatcagaattggttaattggttgtaacactggcagagcattacgctgacttgacgggacggcgcaagctcatgaccaaaatcccttaacgtgagttacgcgtcgttccactgagcgtcagaccccgtagaaaagatcaaaggatcttcttgagatcctttttttctgcgcgtaatctgctgcttgcaaacaaaaaaaccaccgctaccagcggtggtttgtttgccggatcaagagctaccaactctttttccgaaggtaactggcttcagcagagcgcagataccaaatactgtccttctagtgtagccgtagttaggccaccacttcaagaactctgtagcaccgcctacatacctcgctctgctaatcctgttaccagtggctgctgccagtggcgataagtcgtgtcttaccgggttggactcaagacgatagttaccggataaggcgcagcggtcgggctgaacggggggttcgtgcacacagcccagcttggagcgaacgacctacaccgaactgagatacctacagcgtgagcattgagaaagcgccacgcttcccgaagggagaaaggcggacaggtatccggtaagcggcagggtcggaacaggagagcgcacgagggagcttccagggggaaacgcctggtatctttatagtcctgtcgggtttcgccacctctgacttgagcgtcgatttttgtgatgctcgtcaggggggcggagcctatggaaaaacgccagcaacgcggcctttttacggttcctggccttttgctggccttttgct

SEQ ID NO: 245 - DNA, 4642 bp, synthetic construct
  misc_feature 1..4642: note = pATI2.0 U6-H1 Plasmid
  source 1..4642: mol_type = other DNA
accggtctgtggaatgtgtgtcagttagggtgtggaaagtccccaggctccccagcaggcagaagtatgcaaagcatgcatctcaattagtcagcaaccaaccggtcttgcacctcagcaaaaggccatccgtcaggatggccttctgcttagtttgatgcctggcagtttatggcgggcgtcctgcccgccaccctccgggccgttgcttcacaacgttcaaatccgctcccggcggatttgtcctactcaggagagcgttcaccgacaaacaacagataaaacgaaaggcccagtcttccgactgagcctttcgttttatttgggccggccatgcctggcagttccctactctcgcgttaacgctagcatggatgttttcccagtcacgacgttcttaagctcgggcccttaaaggaaccaattcagtcgagaattactagtggtaccatatttgcatgtcgctatgtgttctgggaaatcaccataaacgtgaaatgtctttggatttgggaatcttataagttctgtatgagaccactccctaggtttttgtcgacagatctggcgcgccgactaccaaaatgacttcggatatgaccattatggtgcccgacttcgtaatttacgcgtacccatttggatgacggtgcgtccatgtttgttctgcatgcctgagatagtaaggccgacccccaacaatccacaaggccacgattgacacatgaggttccttttttaaacctgaacctttagttcacacaggtggctgcgccgccgtgaatggtggcagtagttacttctaatcaagctcaatccctcggctctgaagaggacatagtagacctcatctggtctttcgactacggggggtaacagatgtcggtggtataacaatcctccacgagatcatttcacgtaagcatgacttttacacctatcggaatcatataactgttaggcaatggtttatgattgggcgacagacgtcagatcggcgaacctttacgtagccccccgttcatctagacaggaagagggcctatttcccatgattccttcatatttgcatatacgatacaaggctgttagagagataattagaattaatttgactgtaaacacaaagatattagtacaaaatacgtgacgtagaaagtaataatttcttgggtagtttgcagttttaaaattatgttttaaaatggactatcatatgcttaccgtaacttgaaagtatttcgatttcttggctttatatatcttgtggaaaggacgaaacttgttttttctcgagtagctagagaattcgtcgacggaactccatatatgggctatgaactaatgaccccgtaattgattactattaataactagccatccagctgatatccgccggcgctgcagctacgccaactggcgcagcattcgacgcagcggctcggcggcgccccataacaactggtcgcctacggtaaacgccgacaagaactctggccccatgttcagcttacgcagacgaccaaccggcgtagtcaacgtgccggtcaccgccgccggggttaattcgcgcatagtgatatcacgatcgttcggcaccactttcgcccacggattatgtgccgccagcagttcttccaccgtcggaatggatacctcttttttcagcttgatggtgaacgcctggctgtgacagcgcagcgcgccgacgcgcacacacaaaccatcaaccggaatcacagaggcagtattgagaatcttgttggtttccgcctggcctttccactcttcgcggctctggccgttatcgagctgtttgtcgatccaggggatcaggcttcccgccagcggtacgccaaagttatcaaccggcagctcgccgctgcgggtcaatgccgtaactttgcgttcaatatcaagaattgcggaagacggcgtcgccagttcatcggcgacatggccatacaactgacccatctgggttaacagctcgcgcatatggcgcgcgccgccgccggaggcggcctgataggtcgcgacggatacccagtcaacgagattatgggcaaagagaccgcccagcgacatcaacatcaggctaacggtacagttaccgcccacaaaggtcttcacgccattgttcaggccgtcggtaatcacgtcctggttgaccgggtcgagaataataatggcatcatctttcatgcgcagcgtagaagccgcatcaatccagtaaccctgccatccgctttcgcgcagctttggataaatttcgttggtataatcgccgccctggcaggtcacgatgatatcgagcgcttttagcgcatccagatcaaaagcgtcctgtagcgtgccggtggaggtgtcgccgaaggtgggcgccgcctgtccaaactgggaggtagaaaagaaaacagggcgaatagcgtcgaaatcgcgctcctctaccatgcgttgcatgagaacagagccgaccattccgcgccagccgataaaaccaacatttttcatagcgtttttttcctgcaaagagatgtgctgtgtatgcgcgccagtatcctgtggcgcatccttcaccataaaggatcttcacctagatccttttaaattaaaaatgaagttttaaatcaatctaaagtatatatgagtaaacttggtctgacagtctgcaggatatcccatgggcattggcgcagaaaaaaatgcctgatgcgacgctgcgcgtcttatactcccacatatgccagattcagcaacggatacggcttccccaacttgcccacttccatacgtgtcctccttaccagaaatttatccttaaccatggaagctttgcagctctggcccgtgtctcaaaatctctgatgttacattgcacaagataaaaatatatcatcatgaacaataaaactgtctgcttacataaacagtaatacaaggggtgttatgagccatattcaacgggaaacgtcgaggccgcgattaaattccaacatggatgctgatttatatgggtataaatgggctcgcgataatgtcgggcaatcaggtgcgacaatctatcgcttgtatgggaagcccgatgcgccagagttgtttctgaaacatggcaaaggtagcgttgccaatgatgttacagatgagatggtcagactaaactggctgacggaatttatgcctcttccgaccatcaagcattttatccgtactcctgatgatgcatggttactcaccactgcgatccccggaaaaacagcattccaggtattagaagaatatcctgattcaggtgaaaatattgttgatgcgctggcagtgttcctgcgccggttgcattcgattcctgtttgtaattgtccttttaacagcgatcgcgtatttcgtctcgctcaggcgcaatcacgaatgaataacggtttggttgatgcgagtgattttgatgacgagcgtaatggctggcctgttgaacaagtctggaaagaaatgcataaacttttgccattctcaccggattcagtcgtcactcatggtgatttctcacttgataaccttatttttgacgaggggaaattaataggttgtattgatgttggacgagtcggaatcgcagaccgataccaggatcttgccatcctatggaactgcctcggtgagttttctccttcattacagaaacggctttttcaaaaatatggtattgataatcctgatatgaataaattgcagtttcatttgatgctcgatgagtttttctaaagctttcagaattggttaattggttgtaacactggcagagcattacgctgacttgacgggacggcgcaagctcatggatcccaattggcggccgcttaattaaacatgtgagctcgatgtacattcgaaggaccccaaaatcccttaacgtgagttacgcgtcgttccactgagcgtcagaccccgtagaaaagatcaaaggatcttcatcgatttgagatcctttttttctgcgcgtaatctgctgcttgcaaacaaaaaaaccaccgctaccagcggtggtttgtttgccggatcaagagctaccaactctttttccgaaggtaactggcttcagcagagcgcagataccaaatactgtccttctagtgtagccgtagttaggccaccacttcaagaactctgtagcaccgcctacatacctcgctctgctaatcctgttaccagtggctgctgccagtggcgataagtcgtgtcttaccgggttggactcaagacgatagttaccggataaggcgcagcggtcgggctgaacggggggttcgtgcacacagcccagcttggagcgaacgacctacaccgaactgagatacctacagcgtgagctatgagaaagcgccacgcttcccgaagggagaaaggcggacaggtatccggtaagcggcagggtcggaacaggagagcgcacgagggagcttccagggggaaacgcctggtatctttatagtcctgtcgggtttcgccacctctgacttgagcgtcgatttttgtgatgctcgtcaggggggcggagcctatggaaaatcgattccggaaacgccaggctcttccaacgcggcctttttacggttgaagagccctggccttttgctggccttttgct

SEQ ID NO: 246 - DNA, 1261 bp, synthetic construct
  misc_feature 1..1261: note = ASD gene orf + 85 bp upstream
  source 1..1261: mol_type = other DNA
ctgtcagaccaagtttactcatatatactttagattgatttaaaacttcatttttaatttaaaaggatctaggtgaagatcctttatggtgaaggatgcgccacaggatactggcgcgcatacacagcacatctctttgcaggaaaaaaacgctatgaaaaatgttggttttatcggctggcgcggaatggtcggctctgttctcatgcaacgcatggtagaggagcgcgatttcgacgctattcgccctgttttcttttctacctcccagtttggacaggcggcgcccaccttcggcgacacctccaccggcacgctacaggacgcttttgatctggatgcgctaaaagcgctcgatatcatcgtgacctgccagggcggcgattataccaacgaaatttatccaaagctgcgcgaaagcggatggcagggttactggattgatgcggcttctacgctgcgcatgaaagatgatgccattattattctcgacccggtcaaccaggacgtgattaccgacggcctgaacaatggcgtgaagacctttgtgggcggtaactgtaccgttagcctgatgttgatgtcgctgggcggtctctttgcccataatctcgttgactgggtatccgtcgcgacctatcaggccgcctccggcggcggcgcgcgccatatgcgcgagctgttaacccagatgggtcagttgtatggccatgtcgccgatgaactggcgacgccgtcttccgcaattcttgatattgaacgcaaagttacggcattgacccgcagcggcgagctgccggttgataactttggcgtaccgctggcgggaagcctgatcccctggatcgacaaacagctcgataacggccagagccgcgaagagtggaaaggccaggcggaaaccaacaagattctcaatactgcctctgtgattccggttgatggtttgtgtgtgcgcgtcggcgcgctgcgctgtcacagccaggcgttcaccatcaagctgaaaaaagaggtatccattccgacggtggaagaactgctggcggcacataatccgtgggcgaaagtggtgccgaacgatcgtgatatcactatgcgcgaattaaccccggcggcggtgaccggcacgttgactacgccggttggtcgtctgcgtaagctgaacatggggccagagttcttgtcggcgtttaccgtaggcgaccagttgttatggggcgccgccgagccgctgcgtcgaatgctgcgccagttggcgtag

SEQ ID NO: 247 - DNA, 4112 bp, synthetic construct
  misc_feature 1..4112: note = pATI2.0 synthetic v26 scramble pBR322ori.dna
  source 1..4112: mol_type = other DNA
accggtctgtggaatgtgtgtcagttagggtgtggaaagtccccaggctccccagcaggcagaagtatgcaaagcatgcatctcaattagtcagcaaccaaccggtcttgcacctcagcaaaaggccatccgtcaggatggccttctgcttagtttgatgcctggcagtttatggcgggcgtcctgcccgccaccctccgggccgttgcttcacaacgttcaaatccgctcccggcggatttgtcctactcaggagagcgttcaccgacaaacaacagataaaacgaaaggcccagtcttccgactgagcctttcgttttatttgggccggccatgcctggcagttccctactctcgcgttaacgctagcatggatgttttcccagtcacgacgttcttaagctcgggcccttaaaggaaccaattcagtcgagaattactagtggtacccaggaagagggcctatttcccatgattccttcatatttgcatatacgatacaaggctgttagagagataattagaattaatttgactgtaaacacaaagatattagtacaaaatacgtgacgtagaaagtaataatttcttgggtagtttgcagttttaaaattatgttttaaaatggactatcatatgcttaccgtaacttgaaagtatttcgatttcttggctttatatatcttgtggaaaggacgaaactagcaacaagatgaagagcaccaattctagagattggtgctcttcatcttgttgtttttctcgagtagctagagaattcgtcgacggaactccatatatgggctatgaactaatgaccccgtaattgattactattaataactagccatccagctgatatccgccggcgctgcagctacgccaactggcgcagcattcgacgcagcggctcggcggcgccccataacaactggtcgcctacggtaaacgccgacaagaactctggccccatgttcagcttacgcagacgaccaaccggcgtagtcaacgtgccggtcaccgccgccggggttaattcgcgcatagtgatatcacgatcgttcggcaccactttcgcccacggattatgtgccgccagcagttcttccaccgtcggaatggatacctcttttttcagcttgatggtgaacgcctggctgtgacagcgcagcgcgccgacgcgcacacacaaaccatcaaccggaatcacagaggcagtattgagaatcttgttggtttccgcctggcctttccactcttcgcggctctggccgttatcgagctgtttgtcgatccaggggatcaggcttcccgccagcggtacgccaaagttatcaaccggcagctcgccgctgcgggtcaatgccgtaactttgcgttcaatatcaagaattgcggaagacggcgtcgccagttcatcggcgacatggccatacaactgacccatctgggttaacagctcgcgcatatggcgcgcgccgccgccggaggcggcctgataggtcgcgacggatacccagtcaacgagattatgggcaaagagaccgcccagcgacatcaacatcaggctaacggtacagttaccgcccacaaaggtcttcacgccattgttcaggccgtcggtaatcacgtcctggttgaccgggtcgagaataataatggcatcatctttcatgcgcagcgtagaagccgcatcaatccagtaaccctgccatccgctttcgcgcagctttggataaatttcgttggtataatcgccgccctggcaggtcacgatgatatcgagcgcttttagcgcatccagatcaaaagcgtcctgtagcgtgccggtggaggtgtcgccgaaggtgggcgccgcctgtccaaactgggaggtagaaaagaaaacagggcgaatagcgtcgaaatcgcgctcctctaccatgcgttgcatgagaacagagccgaccattccgcgccagccgataaaaccaacatttttcatagcgtttttttcctgcaaagagatgtgctgtgtatgcgcgccagtatcctgtggcgcatccttcaccataaaggatcttcacctagatccttttaaattaaaaatgaagttttaaatcaatctaaagtatatatgagtaaacttggtctgacagtctgcaggatatcccatgggcattggcgcagaaaaaaatgcctgatgcgacgctgcgcgtcttatactcccacatatgccagattcagcaacggatacggcttccccaacttgcccacttccatacgtgtcctccttaccagaaatttatccttaaccatggaagctttgcagctctggcccgtgtctcaaaatctctgatgttacattgcacaagataaaaatatatcatcatgaacaataaaactgtctgcttacataaacagtaatacaaggggtgttatgagccatattcaacgggaaacgtcgaggccgcgattaaattccaacatggatgctgatttatatgggtataaatgggctcgcgataatgtcgggcaatcaggtgcgacaatctatcgcttgtatgggaagcccgatgcgccagagttgtttctgaaacatggcaaaggtagcgttgccaatgatgttacagatgagatggtcagactaaactggctgacggaatttatgcctcttccgaccatcaagcattttatccgtactcctgatgatgcatggttactcaccactgcgatccccggaaaaacagcattccaggtattagaagaatatcctgattcaggtgaaaatattgttgatgcgctggcagtgttcctgcgccggttgcattcgattcctgtttgtaattgtccttttaacagcgatcgcgtatttcgtctcgctcaggcgcaatcacgaatgaataacggtttggttgatgcgagtgattttgatgacgagcgtaatggctggcctgttgaacaagtctggaaagaaatgcataaacttttgccattctcaccggattcagtcgtcactcatggtgatttctcacttgataaccttatttttgacgaggggaaattaataggttgtattgatgttggacgagtcggaatcgcagaccgataccaggatcttgccatcctatggaactgcctcggtgagttttctccttcattacagaaacggctttttcaaaaatatggtattgataatcctgatatgaataaattgcagtttcatttgatgctcgatgagtttttctaaagctttcagaattggttaattggttgtaacactggcagagcattacgctgacttgacgggacggcgcaagctcatggatcccaattggcggccgcttaattaaacatgtgagctcgatgtacattcgaaggaccccaaaatcccttaacgtgagttacgcgtcgttccactgagcgtcagaccccgtagaaaagatcaaaggatcttcatcgatttgagatcctttttttctgcgcgtaatctgctgcttgcaaacaaaaaaaccaccgctaccagcggtggtttgtttgccggatcaagagctaccaactctttttccgaaggtaactggcttcagcagagcgcagataccaaatactgtccttctagtgtagccgtagttaggccaccacttcaagaactctgtagcaccgcctacatacctcgctctgctaatcctgttaccagtggctgctgccagtggcgataagtcgtgtcttaccgggttggactcaagacgatagttaccggataaggcgcagcggtcgggctgaacggggggttcgtgcacacagcccagcttggagcgaacgacctacaccgaactgagatacctacagcgtgagctatgagaaagcgccacgcttcccgaagggagaaaggcggacaggtatccggtaagcggcagggtcggaacaggagagcgcacgagggagcttccagggggaaacgcctggtatctttatagtcctgtcgggtttcgccacctctgacttgagcgtcgatttttgtgatgctcgtcaggggggcggagcctatggaaaatcgattccggaaacgccaggctcttccaacgcggcctttttacggttgaagagccctggccttttgctggccttttgct

SEQ ID NO: 248 - DNA, 165 bp, synthetic construct
  misc_feature 1..165: note = miR-16-2
  source 1..165: mol_type = other DNA
ccggatcaacgccctaggtttatgtttggatgaactgacatacttgttccactctagcagcacgtaaatattggcgtagtgaaatatatattaaacaccaatattactgtgctgctttagtgtgacagggatacagcaactattttatcaattgtttgcgtcgac

SEQ ID NO: 249 - DNA, 165 bp, synthetic construct
  misc_feature 55..75: note = n may be any nucleotide
  misc_feature 97..117: note = n may be any nucleotide
  misc_feature 1..165: note = source = microRNA backbone where Ns represent insertedanti-sense and sense microRNAs
  source 1..165: mol_type = other DNA
ccggatcaacgccctaggtttatgtttggatgaactgacatacgcgtatccgtcnnnnnnnnnnnnnnnnnnnnngtagtgaaatatatattaaacnnnnnnnnnnnnnnnnnnnnntacggtaacgcggaattcgcaactattttatcaattttttgcgtcgac

SEQ ID NO: 250 - DNA, 708 bp, Salmonella typhimurium
  misc_feature 1..708: note = endA
  source 1..708: mol_type = genomic DNA
atgtaccgtaatttctcttttgccgctgtgttgctggccgcagcgttttcaggccaggccctggccgatggcattaacaatttttctcaggccaaagcggcgagcgtcaaagtcaatgctgacgcgcccggcagcttttactgcgggtgccaaatccgctggcagggtaaaaaaggcgtcgtagacctggagtcctgcggctataaggtgcgtaaaaacgagaatcgcgccagacgcattgagtgggagcacgttgtccccgcctggcaattcggtcatcagcgccagtgctggcaggacggcgggcgaaaaaactgcgctaaagacccggtctaccgcaaaatggaaagcgatatgcataacctgcaacccgcgattggcgaagtgaatggcgatcgcggcaactttatgtatagccagtggaacggcggcgaaggtcagtacgggcagtgcgccatgaaagtagatttcaaagcgaagctcgccgagccgcccgcccgcgcccgtggcgcaatcgcccgcacttatttttatatgcgcgaccaataccaactgaaactttcccgccaacaaacgcagctttttaacgtctgggataagcagtaccccgttaccgcctgggagtgcgagcgcgatgcgcgtatcgcgaaggtccagggtaatcataatccctatgtgcaacgcgcttgccaggcgcgaaagagctaa

SEQ ID NO: 251 - protein, 235 aa, Salmonella typhimurium
  REGION 1..235: note = endonuclease I (encoded by endA)
MYRNFSFAAALLAAAFSGQALADGINNFSQAKAASVKVNADAPGSFYCGCQIRWQGKKGVVDLESCGYKVRKNENRARRIEWEHVVPAWQFGHQRQCWQDGGRKNCAKDPVYRKMESDMHNLQPAIGEVNGDRGNFMYSQWNGGEGQYGQCAMKVDFKAKIAEPPARARGAIARIYFYMRDQYQLKLSRQQTQLFNVWDKQYPVTAWECERDARIAKVQGNHNPYVQRACQARKS

SEQ ID NO: 252 - DNA, 78 bp, Homo sapiens
  misc_feature 1..78: note = microRNA-103a1 (miR-103a1)
  source 1..78: mol_type = genomic DNA
tactgccctcggcttctttacagtgctgccttgttgcatatggatcaagcagcattgtacagggctatgaaggcattg

SEQ ID NO: 253 - DNA, 71 bp, Homo sapiens
  misc_feature 1..71: note = microRNA-30a (miR-30a)
  source 1..71: mol_type = genomic DNA
gcgactgtaaacatcctcgactggaagctgtgaagccacagatgggctttcagtcggatgtttgcagctgc

SEQ ID NO: 254 - DNA, 615 bp, synthetic construct
  misc_feature 1..615: note = pMB1 origin of replication
  source 1..615: mol_type = other DNA
aaaggatcttcttgagatcctttttttctgcgcgtaatctgctgcttgcaaacaaaaaaaccaccgctaccagcggtggtttgtttgccggatcaagagctaccaactctttttccgaaggtaactggcttcagcagagcgcagataccaaatactgttcttctagtgtagccgtagttaggccaccacttcaagaactctgtagcaccgcctacatacctcgctctgctaatcctgttaccagtggctgctgccagtggcgataagtcgtgtcttaccgggttggactcaagacgatagttaccggataaggcgcagcggtcgggctgaacggggggttcgtgcacacagcccagcttggagcgaacgacctacaccgaactgagatacctacagcgtgagctatgagaaagcgccacgcttcccgaagggagaaaggcggacaggtatccggtaagcggcagggtcggaacaggagagcgcacgagggagcttccagggggaaacgcctggtatctttatagtcctgtcgggtttcgccacctctgacttgagcgtcgatttttgtgatgctcgtcaggggggcggagcctatggaaaaacgccagcaacgcg

SEQ ID NO: 255 - DNA, 913 bp, synthetic construct
  misc_feature 1..913: note = p15A origin of replication
  source 1..913: mol_type = other DNA
gcgctagcggagtgtatactggcttactatgttggcactgatgagggtgtcagtgaagtgcttcatgtggcaggagaaaaaaggctgcaccggtgcgtcagcagaatatgtgatacaggatatattccgcttcctcgctcactgactcgctacgctcggtcgttcgactgcggcgagcggaaatggcttacgaacggggcggagatttcctggaagatgccaggaagatacttaacagggaagtgagagggccgcggcaaagccgtttttccataggctccgcccccctgacaagcatcacgaaatctgacgctcaaatcagtggtggcgaaacccgacaggactataaagataccaggcgtttccccctggcggctccctcgtgcgctctcctgttcctgcctttcggtttaccggtgtcattccgctgttatggccgcgtttgtctcattccacgcctgacactcagttccgggtaggcagttcgctccaagctggactgtatgcacgaaccccccgttcagtccgaccgctgcgccttatccggtaactatcgtcttgagtccaacccggaaagacatgcaaaagcaccactggcagcagccactggtaattgatttagaggagttagtcttgaagtcatgcgccggttaaggctaaactgaaaggacaagttttggtgactgcgctcctccaagccagttacctcggttcaaagagttggtagctcagagaaccttcgaaaaaccgccctgcaaggcggttttttcgttttcagagcaagagattacgcgcagaccaaaacgatctcaagaagatcatcttattaatcagataaaatatttctagatttcagtgcaatttatctcttcaaatgtagcacctgaagtcagccccatacgatataagttgt

SEQ ID NO: 256 - DNA, 223 bp, synthetic construct
  misc_feature 1..223: note = pSC101 origin of replication
  source 1..223: mol_type = other DNA
gagttatacacagggctgggatctattctttttatctttttttattctttctttattctataaattataaccacttgaatataaacaaaaaaaacacacaaaggtctagcggaatttacagagggtctagcagaatttacaagttttccagcaaaggtctagcagaatttacagatacccacaactcaaaggaaaaggactagtaattatcattgactagccc

SEQ ID NO: 257 - DNA, 602 bp, Escherichia coli
  misc_feature 1..602: note = ColE1 origin of replication
  source 1..602: mol_type = genomic DNA
aggatcttcttgagatcctttttttctgcgcgtaatctgctgcttgcaaacaaaaaaaccaccgctaccaacggtggtttgtttgccggatcaagagctaccaactctttttccgaaggtaactggcttcagcagagcgcagataccaaatactgtccttctagtgtagccgtagtcgggccactacttcaagaactctgtagcaccgtttgtgccatcatcgctctgctaatccggttaccagtggctgctgccagtggcgttaaggcgtgccttaccgggttggactcaagacgatagttaccggataaggcgcagcggtcgggctgaacggggggttcgtgcacacagcccagcttggagcgaacgacctacaccgaactgagataccaacagcgtgagctatgagaaagcgccacgcttcccgaagggagaaaggcggacaggtatccggtaagcggcagggtcggaacaggagagcgcacgagggagcttccagggggaaacgcctggtatctttatagtcctgtcgggtttcgccacctctgacttgagcgtctatttttgtgatgctcgtcaggggggcggagcctatggaaaaa

SEQ ID NO: 258 - DNA, 201 bp, Pseudomonas syringae
  misc_feature 1..201: note = pPS10 origin of replication
  source 1..201: mol_type = genomic DNA
acctgaccggcgcggaagcgctcttgatctttttttcttgtttttacttgttgttccttgttttcgtaattttaactatatgatttataagaaaaaaaagggtttaaaggggacagattcagggtttaaaggggacagattcagggtttaaaggggacagattcagggtttaaaggggacagattcaggctgatatccaca

SEQ ID NO: 259 - DNA, 617 bp, Escherichia coli
  misc_feature 1..617: note = RK2 origin of replication
  source 1..617: mol_type = genomic DNA
ccgggctggttgccctcgccgctgggctggcggccgtctatggccctgcaaacgcgccagaaacgccgtcgaagccgtgtgcgagacaccgcggccgccggcgttgtggataccacgcggaaaacttggccctcactgacagatgaggggcggacgttgacacttgaggggccgactcacccggcgcggcgttgacagatgaggggcaggctcgatttcggccggcgacgtggagctggccagcctcgcaaatcggcgaaaacgcctgattttacgcgagtttcccacagatgatgtggacaagcctggggataagtgccctgcggtattgacacttgaggggcgcgactactgacagatgaggggcgcgatccttgacacttgaggggcagagtgatgacagatgaggggcgcacctattgacatttgaggggctgtccacaggcagaaaatccagcatttgcaagggtttccgcccgtttttcggccaccgctaacctgtcttttaacctgcttttaaaccaatatttataaaccttgtttttaaccagggctgcgccctggcgcgtgaccgcgcacgccgaaggggggtgcccccccttctcgaaccctcccgg

SEQ ID NO: 260 - DNA, 639 bp, Escherichia coli
  misc_feature 1..639: note = R6K alpha origin of replication
  source 1..639: mol_type = genomic DNA
tcttacttctttgcgtagctgttaaatacagcgttgttttgataaaatcatcattatcatcgataatgctttcttcaatttttttatccttactctttaataaagcacttgctaataacttcataccttttgcaactgtcaaatttggttcatcagggtaaatgcttttaaggcatactaacaaataatcatggtcttcatcttcaactctaaactgaatttttttcatcataactcccaacaagaaccgactgtaggtcaccgggcaaacgctgaaaaataacgtcgaatgacgtcattttgcggcgtttgccctatcctgcatcgcagtagaaaatgccacaactgaaattgtgcttcagtatgtacagaaatgcaaaatctgagggatttcgtagctgaaagatcgccagtcttcgaccgtaaggataggagttgctgtaagacctgtgcggggcgttcgcttcgcgaacgggtctggcagggggcacaagcgctgtgctgtgatatatgcaaaagaagccacccacgaacgggagggcttcggcgaatcgactatagtgatctatttacccggctgattgtcgccttctagccctcgcgggcatcatgcaaccagtgcctgaatttagttatatg

SEQ ID NO: 261 - DNA, 1027 bp, Escherichia coli
  misc_feature 1..1027: note = R6K beta origin of replication
  source 1..1027: mol_type = genomic DNA
tgaagctttttttatgaatttatctgaagctgatgcagcttttctcaaggtatttgatgaaaccgtacctcccaaaaaagctaaggggtgatatatggctaaaatttacgatttccctcaaggagccgaacgccgcaggatgcaccgcaaaatccagtggaacaacgctgtaaaattatctaaaaatggctggagtaagccagaggttaaacgctggtcttttttagcattcatctcaactggctggtattactttcgcctttcggtagcagtcattttccatatcattactatttgtggtttagctgtgctcgcggcgttaagcaatacgatattctggattggtggcgcgatatgtcttgtaacctggtatacaaatgaccatcaaatttggagtactaacaatcttactatccctattgttttcggactttgggtgttaagtttagtagctgcaccactcatagattttttcagtcaaaaattgcccttttatcgtcttcttgtgcctgatgcgaagcgtgaggaagtgggcgaagatgattcttaaagccctgccctgtacggctttaacgccttctcgcggtagatctatggatgttgagaatgtagtatggttatactgcgatgcaggatagggcaaacgccgtaaaatgacgtctttgacgttatttttcagcgcttgcccggtgacctacagtcggtgcttgttgggagattttatgaagtttactagtaaaggattttatcagtgataaatatgcaaaggctattaacattttaaatgataaccttaaagaaaactactatgttttttatggtgtaaggttaagtgaaattctttttcctgcaagtgattatggtacagatgatttttttaaggagtttgaggaaataaacaacgttaccttgcctttagttgtttttgaaataaatgaacgtgaacctgtgattgtaattggttttgatgaaataaatcctgcgattcttatagagaaatccggtataaaggttttagtaatcggac

SEQ ID NO: 262 - DNA, 442 bp, Escherichia coli
  misc_feature 1..442: note = R6K gamma origin of replication
  source 1..442: mol_type = genomic DNA
gatcgctagtttgttttgactccatccattagggcttctaaaacgccttctaaggccatgtcagccgttaagtgttcctgtgtcactgaaaattgctttgagaggctctaagggcttctcagtgcgttacatccctggcttgttgtccacaaccgttaaaccttaaaagctttaaaagccttatatattcttttttttcttataaaacttaaaaccttagaggctatttaagttgctgatttatattaattttattgttcaaacatgagagcttagtacgtgaaacatgagagcttagtacgttagccatgagagcttagtacgttagccatgagggtttagttcgttaaacatgagagcttagtacgttaaacatgagagcttagtacgtgaaacatgagagcttagtacgtactatcaacaggttgaactgctgatcttc

SEQ ID NO: 263 - DNA, 242 bp, Enterobacteria phage P1
  misc_feature 1..242: note = P1 origin of plasmid replication oriR
  source 1..242: mol_type = genomic DNA
tttcccgtcaacacacatcctatatcccgccagcacacattagcaacccgtcagcacacatttttatccctccagcacacatcgttttccctccagcacacatcgcgatacacttctaagccagacgtggcgcggcctgcaacgatcagggatctatatggatctaattgggatctgtatggacctgattattggatctatccagtggataatgtggataagtgaaaaaccggccaacgtag

SEQ ID NO: 264 - DNA, 792 bp, synthetic construct
  misc_feature 1..792: note = R1 origin of replication
  source 1..792: mol_type = other DNA
ttatccacatttaactgcaagggacttccccataaggttacaaccgttcatgtcataaagcgccagccgccagtcttacagggtgcaatgtatcttttaaacacctgtttatatctcctttaaactacttaattacattcatttaaaaagaaaacctattcactgcctgtcctgtggacagacagatatgcacctcccaccgcaagcggcgggccccgaccggagccactttagttacaacacacaaaaacaacctccagaaaaaccccggtccagcgcagaaccgaaaccacaaagcccctccctcataactgaaaagcggccccgccccggcccaaagggccggaacagagtcgcttttaattatgaatgttgtaactacatcttcatcgctgtcagtcttctcgctggaagttctcagtacacgctcgtaagcggccctcacggcccgctaacgcggagatacgccccgacttcgggtaaaccctcgtcgggaccactccgaccgcgcacagaagctctctcatggctgaaagcgggtatggtctggcagggctggggatgggtaaggtgaaatctatcaatcagtaccggcttacgccgggcttcggcggttttactcctgtatcatatgaaacaacagagtgccgccttccatgccgctgatgcggcatatcctggtaacgatatctgaattgttatacatgtgtatatacgtggtaatgacaaaaataggacaagttaaaaatttacaggcgatgcaatgattcaaacacgtaatcaatatctgca

SEQ ID NO: 265 - DNA, 2920 bp, synthetic construct
  misc_feature 1..2920: note = pWSK origin of replication
  source 1..2920: mol_type = other DNA
ccgatgcccttgagagccttcaacccagtcagctccttccggtgggcgcggggcatgactatcgtcgccgcacttatgactgtcttctttatcatgcaactcgtaggacagggtgccggcagcgctctgggtcattttcggcgaggaccgctttcgctggagcgcgacgatgatcggcctgtcgcttgcggtattcggaatcttgcacgccctcgctcaagccttcgtcactggtcccgccaccaaacgtttcggcgagaagcaggccattatcgccggcatggcggccgacgcgctgggctacgtcttgctggcgttcgcgacgcgaggctggatggccttccccattatgattcttctcgcttccggcggcatcgggatgcccgcgttgcaggccatgctgtccaggcaggtagatgacgaccatcagggacagcttcaaggatcgctcgcggctcttaccagcctaacttcgatcattggaccgctgatcgtcacggcgatttatgccgcctcggcgagcacatggaacgggttggcatggattgtaggcgccgccctataccttgtctgcctccccgcgttgcgtcgcggtgcatggagccgggccacctcgacctgaatggaagccggcggcacctcgctaacggattcaccactccgcagacccgccataaaacgccctgagaagcccgtgacgggcttttcttgtattatgggtagtttccttgcatgaatccataaaaggcgcctgtagtgccatttacccccattcactgccagagccgtgagcgcagcgaactgaatgtcacgaaaaagacagcgactcaggtgcctgatggtcggagacaaaaggaatattcagcgatttgcccgagcttgcgagggtgctacttaagcctttagggttttaaggtctgttttgtagaggagcaaacagcgtttgcgacatccttttgtaatactgcggaactgactaaagtagtgagttatacacagggctgggatctattctttttatctttttttattctttctttattctataaattataaccacttgaatataaacaaaaaaaacacacaaaggtctagcggaatttacagagggtctagcagaatttacaagttttccagcaaaggtctagcagaatttacagatacccacaactcaaaggaaaaggactagtaattatcattgactagcccatctcaattggtatagtgattaaaatcacctagaccaattgagatgtatgtctgaattagttgttttcaaagcaaatgaactagcgattagtcgctatgacttaacggagcatgaaaccaagctaattttatgctgtgtggcactactcaaccccacgattgaaaaccctacaaggaaagaacggacggtatcgttcacttataaccaatacgctcagatgatgaacatcagtagggaaaatgcttatggtgtattagctaaagcaaccagagagctgatgacgagaactgtggaaatcaggaatcctttggttaaaggctttgagattttccagtggacaaactatgccaagttctcaagcgaaaaattagaattagtttttagtgaagagatattgccttatcttttccagttaaaaaaattcataaaatataatctggaacatgttaagtcttttgaaaacaaatactctatgaggatttatgagtggttattaaaagaactaacacaaaagaaaactcacaaggcaaatatagagattagccttgatgaatttaagttcatgttaatgcttgaaaataactaccatgagtttaaaaggcttaaccaatgggttttgaaaccaataagtaaagatttaaacacttacagcaatatgaaattggtggttgataagcgaggccgcccgactgatacgttgattttccaagttgaactagatagacaaatggatctcgtaaccgaacttgagaacaaccagataaaaatgaatggtgacaaaataccaacaaccattacatcagattcctacctacataacggactaagaaaaacactacacgatgctttaactgcaaaaattcagctcaccagttttgaggcaaaatttttgagtgacatgcaaagtaagtatgatctcaatggttcgttctcatggctcacgcaaaaacaacgaaccacactagagaacatactggctaaatacggaaggatctgaggttcttatggctcttgtatctatcagtgaagcatcaagactaacaaacaaaagtagaacaactgttcaccgttacatatcaaagggaaaactgtccatatgcacagatgaaaacggtgtaaaaaagatagatacatcagagcttttacgagtttttggtgcattcaaagctgttcaccatgaacagatcgacaatgtaacagatgaacagcatgtaacacctaatagaacaggtgaaaccagtaaaacaaagcaactagaacatgaaattgaacacctgagacaacttgttacagctcaacagtcacacatagacagcctgaaacaggcgatgctgcttatcgaatcaaagctgccgacaacacgggagccagtgacgcctcccgtggggaaaaaatcatggcaattctggaagaaatagcgctttcagccggcaaaccggctgaagccggatctgcgattctgataacaaactagcaacaccagaacagcccgtttgcgggcagcaaaacccgtacttttggacgttccggcggttttttgtggcgagtggtgttcgggcggtgcgcgcaagatccattatgttaaacgggcgagtttacatctcaaaaccgcccgcttaacaccatcagaaatcctcagcgcgattttaagcaccaacccccccccgtaacacccaaatccatactgaaagtggctttgttgaataaatc

SEQ ID NO: 266 - DNA, 37 bp, Escherichia coli
  misc_feature 1..37: note = ColE2 origin of replication
  source 1..37: mol_type = genomic DNA
aaaatgagaccagataagccttatcagataacagcgc

SEQ ID NO: 267 - DNA, 668 bp, synthetic construct
  misc_feature 1..668: note = pUC origin of replication
  source 1..668: mol_type = other DNA
tgagcaaaaggccagcaaaaggccaggaaccgtaaaaaggccgcgttgctggcgtttttccataggctccgcccccctgacgagcatcacaaaaatcgacgctcaagtcagaggtggcgaaacccgacaggactataaagataccaggcgtttccccctggaagctccctcgtgcgctctcctgttccgaccctgccgcttaccggatacctgtccgcctttctcccttcgggaagcgtggcgctttctcatagctcacgctgtaggtatctcagttcggtgtaggtcgttcgctccaagctgggctgtgtgcacgaaccccccgttcagcccgaccgctgcgccttatccggtaactatcgtcttgagtccaacccggtaagacacgacttatcgccactggcagcagccactggtaacaggattagcagagcgaggtatgtaggcggtgctacagagttcttgaagtggtggcctaactacggctacactagaagaacagtatttggtatctgcgctctgctgaagccagttaccttcggaaaaagagttggtagctcttgatccggcaaacaaaccaccgctggtagcggtggtttttttgtttgcaagcagcagattacgcgcagaaaaaaaggatctcaagaagatcctttgatcttttctac

SEQ ID NO: 268 - DNA, 457 bp, Bacteriophage F1
  misc_feature 1..457: note = F1 origin of replication
  source 1..457: mol_type = genomic DNA
gacgcgccctgtagcggcgcattaagcgcggcgggtgtggtggttacgcgcagcgtgaccgctacacttgccagcgccctagcgcccgctcctttcgctttcttcccttcctttctcgccacgttcgccggctttccccgtcaagctctaaatcgggggctccctttagggttccgatttagtgctttacggcacctcgaccccaaaaaacttgattagggtgatggttcacgtagtgggccatcgccctgatagacggtttttcgccctttgacgttggagtccacgttctttaatagtggactcttgttccaaactggaacaacactcaaccctatctcggtctattcttttgatttataagggattttgccgatttcggcctattggttaaaaaatgagctgatttaacaaaaatttaacgcgaattttaacaaaatattaacgcttacaattt

SEQ ID NO: 269 - DNA, 534 bp, Homo sapiens
  misc_feature 1..534: note = IL-7
  source 1..534: mol_type = genomic DNA
atgttccatgtttcttttaggtatatctttggacttcctcccctgatccttgttctgttgccagtagcatcatctgattgtgatattgaaggtaaagatggcaaacaatatgagagtgttctaatggtcagcatcgatcaattattggacagcatgaaagaaattggtagcaattgcctgaataatgaatttaacttttttaaaagacatatctgtgatgctaataaggaaggtatgtttttattccgtgctgctcgcaagttgaggcaatttcttaaaatgaatagcactggtgattttgatctccacttattaaaagtttcagaaggcacaacaatactgttgaactgcactggccaggttaaaggaagaaaaccagctgccctgggtgaagcccaaccaacaaagagtttggaagaaaataaatctttaaaggaacagaaaaaactgaatgacttgtgtttcctaaagagactattacaagagataaaaacttgttggaataaaattttgatgggcactaaagaacactga

SEQ ID NO: 270 - DNA, 987 bp, Homo sapiens
  misc_feature 1..987: note = IL12B
  source 1..987: mol_type = genomic DNA
atgtgtcaccagcagttggtcatctcttggttttccctggtttttctggcatctcccctcgtggccatatgggaactgaagaaagatgtttatgtcgtagaattggattggtatccggatgcccctggagaaatggtggtcctcacctgtgacacccctgaagaagatggtatcacctggaccttggaccagagcagtgaggtcttaggctctggcaaaaccctgaccatccaagtcaaagagtttggagatgctggccagtacacctgtcacaaaggaggcgaggttctaagccattcgctcctgctgcttcacaaaaaggaagatggaatttggtccactgatattttaaaggaccagaaagaacccaaaaataagacctttctaagatgcgaggccaagaattattctggacgtttcacctgctggtggctgacgacaatcagtactgatttgacattcagtgtcaaaagcagcagaggctcttctgacccccaaggggtgacgtgcggagctgctacactctctgcagagagagtcagaggggacaacaaggagtatgagtactcagtggagtgccaggaggacagtgcctgcccagctgctgaggagagtctgcccattgaggtcatggtggatgccgttcacaagctcaagtatgaaaactacaccagcagcttcttcatcagggacatcatcaaacctgacccacccaagaacttgcagctgaagccattaaagaattctcggcaggtggaggtcagctgggagtaccctgacacctggagtactccacattcctacttctccctgacattctgcgttcaggtccagggcaagagcaagagagaaaagaaagatagagtcttcacggacaagacctcagccacggtcatctgccgcaaaaatgccagcattagcgtgcgggcccaggaccgctactatagctcatcttggagcgaatgggcatctgtgccctgcagttag

SEQ ID NO: 271 - DNA, 762 bp, Homo sapiens
  misc_feature 1..762: note = IL12A
  source 1..762: mol_type = genomic DNA
atgtggccccctgggtcagcctcccagccaccgccctcacctgccgcggccacaggtctgcatccagcggctcgccctgtgtccctgcagtgccggctcagcatgtgtccagcgcgcagcctcctccttgtggctaccctggtcctcctggaccacctcagtttggccagaaacctccccgtggccactccagacccaggaatgttcccatgccttcaccactcccaaaacctgctgagggccgtcagcaacatgctccagaaggccagacaaactctagaattttacccttgcacttctgaagagattgatcatgaagatatcacaaaagataaaaccagcacagtggaggcctgtttaccattggaattaaccaagaatgagagttgcctaaattccagagagacctctttcataactaatgggagttgcctggcctccagaaagacctcttttatgatggccctgtgccttagtagtatttatgaagacttgaagatgtaccaggtggagttcaagaccatgaatgcaaagcttctgatggatcctaagaggcagatctttctagatcaaaacatgctggcagttattgatgagctgatgcaggccctgaatttcaacagtgagactgtgccacaaaaatcctcccttgaagaaccggatttttataaaactaaaatcaagctctgcatacttcttcatgctttcagaattcgggcagtgactattgatagagtgatgagctatctgaatgcttcctaa

SEQ ID NO: 272 - DNA, 489 bp, Homo sapiens
  misc_feature 1..489: note = IL-15
  source 1..489: mol_type = genomic DNA
atgagaatttcgaaaccacatttgagaagtatttccatccagtgctacttgtgtttacttctaaacagtcattttctaactgaagctggcattcatgtcttcattttgggctgtttcagtgcagggcttcctaaaacagaagccaactgggtgaatgtaataagtgatttgaaaaaaattgaagatcttattcaatctatgcatattgatgctactttatatacggaaagtgatgttcaccccagttgcaaagtaacagcaatgaagtgctttctcttggagttacaagttatttcacttgagtccggagatgcaagtattcatgatacagtagaaaatctgatcatcctagcaaacaacagtttgtcttctaatgggaatgtaacagaatctggatgcaaagaatgtgaggaactggaggaaaaaaatattaaagaatttttgcagagttttgtacatattgtccaaatgttcatcaacacttcttga

SEQ ID NO: 273 - DNA, 804 bp, Homo sapiens
  misc_feature 1..804: note = IL15RA
  source 1..804: mol_type = genomic DNA
atggccccgcggcgggcgcgcggctgccggaccctcggtctcccggcgctgctactgctgctgctgctccggccgccggcgacgcggggcatcacgtgccctccccccatgtccgtggaacacgcagacatctgggtcaagagctacagcttgtactccagggagcggtacatttgtaactctggtttcaagcgtaaagccggcacgtccagcctgacggagtgcgtgttgaacaaggccacgaatgtcgcccactggacaacccccagtctcaaatgcattagagaccctgccctggttcaccaaaggccagcgccaccctccacagtaacgacggcaggggtgaccccacagccagagagcctctccccttctggaaaagagcccgcagcttcatctcccagctcaaacaacacagcggccacaacagcagctattgtcccgggctcccagctgatgccttcaaaatcaccttccacaggaaccacagagataagcagtcatgagtcctcccacggcaccccctctcagacaacagccaagaactgggaactcacagcatccgcctcccaccagccgccaggtgtgtatccacagggccacagcgacaccactgtggctatctccacgtccactgtcctgctgtgtgggctgagcgctgtgtctctcctggcatgctacctcaagtcaaggcaaactcccccgctggccagcgttgaaatggaagccatggaggctctgccggtgacttgggggaccagcagcagagatgaagacttggaaaactgctctcaccacctatga

SEQ ID NO: 274 - DNA, 378 bp, Homo sapiens
  misc_feature 1..378: note = CXCL9
  source 1..378: mol_type = genomic DNA
atgaagaaaagtggtgttcttttcctcttgggcatcatcttgctggttctgattggagtgcaaggaaccccagtagtgagaaagggtcgctgttcctgcatcagcaccaaccaagggactatccacctacaatccttgaaagaccttaaacaatttgccccaagcccttcctgcgagaaaattgaaatcattgctacactgaagaatggagttcaaacatgtctaaacccagattcagcagatgtgaaggaactgattaaaaagtgggagaaacaggtcagccaaaagaaaaagcaaaagaatgggaaaaaacatcaaaaaaagaaagttctgaaagttcgaaaatctcaacgttctcgtcaaaagaagactacataa

SEQ ID NO: 275 - DNA, 297 bp, Homo sapiens
  misc_feature 1..297: note = CXCL10
  source 1..297: mol_type = genomic DNA
atgaatcaaactgccattctgatttgctgccttatctttctgactctaagtggcattcaaggagtacctctctctagaactgtacgctgtacctgcatcagcattagtaatcaacctgttaatccaaggtctttagaaaaacttgaaattattcctgcaagccaattttgtccacgtgttgagatcattgctacaatgaaaaagaagggtgagaagagatgtctgaatccagaatcgaaggccatcaagaatttactgaaagcagttagcaaggaaaggtctaaaagatctccttaa

SEQ ID NO: 276 - DNA, 285 bp, Homo sapiens
  misc_feature 1..285: note = CXCL11
  source 1..285: mol_type = genomic DNA
atgagtgtgaagggcatggctatagccttggctgtgatattgtgtgctacagttgttcaaggcttccccatgttcaaaagaggacgctgtctttgcataggccctggggtaaaagcagtgaaagtggcagatattgagaaagcctccataatgtacccaagtaacaactgtgacaaaatagaagtgattattaccctgaaagaaaataaaggacaacgatgcctaaatcccaaatcgaagcaagcaaggcttataatcaaaaaagttgaaagaaagaatttttaa

SEQ ID NO: 277 - DNA, 465 bp, Homo sapiens
  misc_feature 1..465: note = CCL5
  source 1..465: mol_type = genomic DNA
atgaaggtctccgcggcagccctcgctgtcatcctcattgctactgccctctgcgctcctgcatctgcctccccatattcctcggacaccacaccctgctgctttgcctacattgcccgcccactgccccgtgcccacatcaaggagtatttctacaccagtggcaagtgctccaacccagcagtcgtccacaggtcaaggatgccaaagagagagggacagcaagtctggcaggatttcctgtatgactcccggctgaacaagggcaagctttgtcacccgaaagaaccgccaagtgtgtgccaacccagagaagaaatgggttcgggagtacatcaactctttggagatgagctaggatggagagtccttgaacctgaacttacacaaatttgcctgtttctgcttgctcttgtcctagcttgggaggcttcccctcactatcctaccccacccgctccttga

SEQ ID NO: 278 - DNA, 765 bp, Homo sapiens
  misc_feature 1..765: note = 4-1BB Ligand
  source 1..765: mol_type = genomic DNA
atggaatacgcctctgacgcttcactggaccccgaagccccgtggcctcccgcgccccgcgctcgcgcctgccgcgtactgccttgggccctggtcgcggggctgctgctgctgctgctgctcgctgccgcctgcgccgtcttcctcgcctgcccctgggccgtgtccggggctcgcgcctcgcccggctccgcggccagcccgagactccgcgagggtcccgagctttcgcccgacgatcccgccggcctcttggacctgcggcagggcatgtttgcgcagctggtggcccaaaatgttctgctgatcgatgggcccctgagctggtacagtgacccaggcctggcaggcgtgtccctgacggggggcctgagctacaaagaggacacgaaggagctggtggtggccaaggctggagtctactatgtcttctttcaactagagctgcggcgcgtggtggccggcgagggctcaggctccgtttcacttgcgctgcacctgcagccactgcgctctgctgctggggccgccgccctggctttgaccgtggacctgccacccgcctcctccgaggctcggaactcggccttcggtttccagggccgcttgctgcacctgagtgccggccagcgcctgggcgtccatcttcacactgaggccagggcacgccatgcctggcagcttacccagggcgccacagtcttgggactcttccgggtgacccccgaaatcccagccggactcccttcaccgaggtcggaataa

SEQ ID NO: 279 - DNA, 1368 bp, Homo sapiens
  misc_feature 1..1368: note = TNFRSF1A
  source 1..1368: mol_type = genomic DNA
atgggcctctccaccgtgcctgacctgctgctgccactggtgctcctggagctgttggtgggaatatacccctcaggggttattggactggtccctcacctaggggacagggagaagagagatagtgtgtgtccccaaggaaaatatatccaccctcaaaataattcgatttgctgtaccaagtgccacaaaggaacctacttgtacaatgactgtccaggcccggggcaggatacggactgcagggagtgtgagagcggctccttcaccgcttcagaaaaccacctcagacactgcctcagctgctccaaatgccgaaaggaaatgggtcaggtggagatctcttcttgcacagtggaccgggacaccgtgtgtggctgcaggaagaaccagtaccggcattattggagtgaaaaccttttccagtgcttcaattgcagcctctgcctcaatgggaccgtgcacctctcctgccaggagaaacagaacaccgtgtgcacctgccatgcaggtttctttctaagagaaaacgagtgtgtctcctgtagtaactgtaagaaaagcctggagtgcacgaagttgtgcctaccccagattgagaatgttaagggcactgaggactcaggcaccacagtgctgttgcccctggtcattttctttggtctttgccttttatccctcctcttcattggtttaatgtatcgctaccaacggtggaagtccaagctctactccattgtttgtgggaaatcgacacctgaaaaagagggggagcttgaaggaactactactaagcccctggccccaaacccaagcttcagtcccactccaggcttcacccccaccctgggcttcagtcccgtgcccagttccaccttcacctccagctccacctatacccccggtgactgtcccaactttgcggctccccgcagagaggtggcaccaccctatcagggggctgaccccatccttgcgacagccctcgcctccgaccccatccccaacccccttcagaagtgggaggacagcgcccacaagccacagagcctagacactgatgaccccgcgacgctgtacgccgtggtggagaacgtgcccccgttgcgctggaaggaattcgtgcggcgcctagggctgagcgaccacgagatcgatcggctggagctgcagaacgggcgctgcctgcgcgaggcgcaatacagcatgctggcgacctggaggcggcgcacgccgcggcgcgaggccacgctggagctgctgggacgcgtgctccgcgacatggacctgctgggctgcctggaggacatcgaggaggcgctttgcggccccgccgccctcccgcccgcgcccagtcttctcagatga

SEQ ID NO: 280 - DNA, 1386 bp, Homo sapiens
  misc_feature 1..1386: note = TNFRSF1B
  source 1..1386: mol_type = genomic DNA
atggcgcccgtcgccgtctgggccgcgctggccgtcggactggagctctgggctgcggcgcacgccttgcccgcccaggtggcatttacaccctacgccccggagcccgggagcacatgccggctcagagaatactatgaccagacagctcagatgtgctgcagcaaatgctcgccgggccaacatgcaaaagtcttctgtaccaagacctcggacaccgtgtgtgactcctgtgaggacagcacatacacccagctctggaactgggttcccgagtgcttgagctgtggctcccgctgtagctctgaccaggtggaaactcaagcctgcactcgggaacagaaccgcatctgcacctgcaggcccggctggtactgcgcgctgagcaagcaggaggggtgccggctgtgcgcgccgctgcgcaagtgccgcccgggcttcggcgtggccagaccaggaactgaaacatcagacgtggtgtgcaagccctgtgccccggggacgttctccaacacgacttcatccacggatatttgcaggccccaccagatctgtaacgtggtggccatccctgggaatgcaagcatggatgcagtctgcacgtccacgtcccccacccggagtatggccccaggggcagtacacttaccccagccagtgtccacacgatcccaacacacgcagccaactccagaacccagcactgctccaagcacctccttcctgctcccaatgggccccagccccccagctgaagggagcactggcgacttcgctcttccagttggactgattgtgggtgtgacagccttgggtctactaataataggagtggtgaactgtgtcatcatgacccaggtgaaaaagaagcccttgtgcctgcagagagaagccaaggtgcctcacttgcctgccgataaggcccggggtacacagggccccgagcagcagcacctgctgatcacagcgccgagctccagcagcagctccctggagagctcggccagtgcgttggacagaagggcgcccactcggaaccagccacaggcaccaggcgtggaggccagtggggccggggaggcccgggccagcaccgggagctcagattcttcccctggtggccatgggacccaggtcaatgtcacctgcatcgtgaacgtctgtagcagctctgaccacagctcacagtgctcctcccaagccagctccacaatgggagacacagattccagcccctcggagtccccgaaggacgagcaggtccccttctccaaggaggaatgtgcctttcggtcacagctggagacgccagagaccctgctggggagcaccgaagagaagcccctgccccttggagtgcctgatgctgggatgaagcccagttaa

SEQ ID NO: 281 - DNA, 1308 bp, Homo sapiens
  misc_feature 1..1308: note = LTBR
  source 1..1308: mol_type = genomic DNA
atgctcctgccttgggccacctctgcccccggcctggcctgggggcctctggtgctgggcctcttcgggctcctggcagcatcgcagccccaggcggtgcctccatatgcgtcggagaaccagacctgcagggaccaggaaaaggaatactatgagccccagcaccgcatctgctgctcccgctgcccgccaggcacctatgtctcagctaaatgtagccgcatccgggacacagtttgtgccacatgtgccgagaattcctacaacgagcactggaactacctgaccatctgccagctgtgccgcccctgtgacccagtgatgggcctcgaggagattgccccctgcacaagcaaacggaagacccagtgccgctgccagccgggaatgttctgtgctgcctgggccctcgagtgtacacactgcgagctactttctgactgcccgcctggcactgaagccgagctcaaagatgaagttgggaagggtaacaaccactgcgtcccctgcaaggccgggcacttccagaatacctcctcccccagcgcccgctgccagccccacaccaggtgtgagaaccaaggtctggtggaggcagctccaggcactgcccagtccgacacaacctgcaaaaatccattagagccactgcccccagagatgtcaggaaccatgctgatgctggccgttctgctgccactggccttctttctgctccttgccaccgtcttctcctgcatctggaagagccacccttctctctgcaggaaactgggatcgctgctcaagaggcgtccgcagggagagggacccaatcctgtagctggaagctgggagcctccgaaggcccatccatacttccctgacttggtacagccactgctacccatttctggagatgtttccccagtatccactgggctccccgcagccccagttttggaggcaggggtgccgcaacagcagagtcctctggacctgaccagggagccgcagttggaacccggggagcagagccaggtggcccacggtaccaatggcattcatgtcaccggcgggtctatgactatcactggcaacatctacatctacaatggaccagtactggggggaccaccgggtcctggagacctcccagctacccccgaacctccataccccattcccgaagagggggaccctggccctcccgggctctctacaccccaccaggaagatggcaaggcttggcacctagcggagacagagcactgtggtgccacaccctctaacaggggcccaaggaaccaatttatcacccatgactga

SEQ ID NO: 282 - DNA, 1008 bp, Homo sapiens
  misc_feature 1..1008: note = FAS
  source 1..1008: mol_type = genomic DNA
atgctgggcatctggaccctcctacctctggttcttacgtctgttgctagattatcgtccaaaagtgttaatgcccaagtgactgacatcaactccaagggattggaattgaggaagactgttactacagttgagactcagaacttggaaggcctgcatcatgatggccaattctgccataagccctgtcctccaggtgaaaggaaagctagggactgcacagtcaatggggatgaaccagactgcgtgccctgccaagaagggaaggagtacacagacaaagcccatttttcttccaaatgcagaagatgtagattgtgtgatgaaggacatggcttagaagtggaaataaactgcacccggacccagaataccaagtgcagatgtaaaccaaactttttttgtaactctactgtatgtgaacactgtgacccttgcaccaaatgtgaacatggaatcatcaaggaatgcacactcaccagcaacaccaagtgcaaagaggaaggatccagatctaacttggggtggctttgtcttcttcttttgccaattccactaattgtttgggtgaagagaaaggaagtacagaaaacatgcagaaagcacagaaaggaaaaccaaggttctcatgaatctccaactttaaatcctgaaacagtggcaataaatttatctgatgttgacttgagtaaatatatcaccactattgctggagtcatgacactaagtcaagttaaaggctttgttcgaaagaatggtgtcaatgaagccaaaatagatgagatcaagaatgacaatgtccaagacacagcagaacagaaagttcaactgcttcgtaattggcatcaacttcatggaaagaaagaagcgtatgacacattgattaaagatctcaaaaaagccaatctttgtactcttgcagagaaaattcagactatcatcctcaaggacattactagtgactcagaaaattcaaacttcagaaatgaaatccaaagcttggtctag

SEQ ID NO: 283 - DNA, 903 bp, Homo sapiens
  misc_feature 1..903: note = TNFRSF6B
  source 1..903: mol_type = genomic DNA
atgagggcgctggaggggccaggcctgtcgctgctgtgcctggtgttggcgctgcctgccctgctgccggtgccggctgtacgcggagtggcagaaacacccacctacccctggcgggacgcagagacaggggagcggctggtgtgcgcccagtgccccccaggcacctttgtgcagcggccgtgccgccgagacagccccacgacgtgtggcccgtgtccaccgcgccactacacgcagttctggaactacctagagcgctgccgctactgcaacgtcctctgcggggagcgtgaggaggaggcacgggcttgccacgccacccacaaccgtgcctgccgctgccgcaccggcttcttcgcgcacgctggtttctgcttggagcacgcatcgtgtccacctggtgccggcgtgattgccccgggcacccccagccagaacacgcagtgccagccgtgccccccaggcaccttctcagccagcagctccagctcagagcagtgccagccccaccgcaactgcacggccctgggcctggccctcaatgtgccaggctcttcctcccatgacaccctgtgcaccagctgcactggcttccccctcagcaccagggtaccaggagctgaggagtgtgagcgtgccgtcatcgactttgtggctttccaggacatctccatcaagaggctgcagcggctgctgcaggccctcgaggccccggagggctggggtccgacaccaagggcgggccgcgcggccttgcagctgaagctgcgtcggcggctcacggagctcctgggggcgcaggacggggcgctgctggtgcggctgctgcaggcgctgcgcgtggccaggatgcccgggctggagcggagcgtccgtgagcgcttcctccctgtgcactga

SEQ ID NO: 284 - DNA, 783 bp, Homo sapiens
  misc_feature 1..783: note = CD27
  source 1..783: mol_type = genomic DNA
atggcacggccacatccctggtggctgtgcgttctggggaccctggtggggctctcagctactccagcccccaagagctgcccagagaggcactactgggctcagggaaagctgtgctgccagatgtgtgagccaggaacattcctcgtgaaggactgtgaccagcatagaaaggctgctcagtgtgatccttgcataccgggggtctccttctctcctgaccaccacacccggccccactgtgagagctgtcggcactgtaactctggtcttctcgttcgcaactgcaccatcactgccaatgctgagtgtgcctgtcgcaatggctggcagtgcagggacaaggagtgcaccgagtgtgatcctcttccaaacccttcgctgaccgctcggtcgtctcaggccctgagcccacaccctcagcccacccacttaccttatgtcagtgagatgctggaggccaggacagctgggcacatgcagactctggctgacttcaggcagctgcctgcccggactctctctacccactggccaccccaaagatccctgtgcagctccgattttattcgcatccttgtgatcttctctggaatgttccttgttttcaccctggccggggccctgttcctccatcaacgaaggaaatatagatcaaacaaaggagaaagtcctgtggagcctgcagagccttgtcgttacagctgccccagggaggaggagggcagcaccatccccatccaggaggattaccgaaaaccggagcctgcctgctccccctga

SEQ ID NO: 285 - DNA, 1788 bp, Homo sapiens
  misc_feature 1..1788: note = TNFRSF8
  source 1..1788: mol_type = genomic DNA
atgcgcgtcctcctcgccgcgctgggactgctgttcctgggggcgctacgagccttcccacaggatcgacccttcgaggacacctgtcatggaaaccccagccactactatgacaaggctgtcaggaggtgctgttaccgctgccccatggggctgttcccgacacagcagtgcccacagaggcctactgactgcaggaagcagtgtgagcctgactactacctggatgaggccgaccgctgtacagcctgcgtgacttgttctcgagacgacctcgtggagaagacgccgtgtgcatggaactcctcccgtgtctgcgaatgtcgacccggcatgttctgttccacgtctgccgtcaactcctgtgcccgctgcttcttccattctgtctgtccggcagggatgattgtcaagttcccaggcacggcgcagaagaacacggtctgtgagccggcttccccaggggtcagccctgcctgtgccagcccagagaactgcaaggaaccctccagtggcaccatcccccaggccaagcccaccccggtgtccccagcaacctccagtgccagcaccatgcctgtaagagggggcacccgcctcgcccaggaagctgcttctaaactgacgagggctcccgactctccctcctctgtgggaaggcctagttcagatccaggtctgtccccaacacagccatgcccagaggggtctggtgattgcagaaagcagtgtgagcccgactactacctggacgaggccggccgctgcacggcctgcgtgagctgttctcgagatgaccttgtggagaagacgccatgtgcatggaactcctcccgcacctgcgaatgtcgacctggcatgatctgtgccacatcagccaccaactcctgtgcccgctgtgtcccctacccaatctgtgcagcagagacggtcaccaagccccaggatatggctgagaaggacaccacctttgaggcgccacccctggggacccagccggactgcaaccccaccccagagaatggcgaggcgcctgccagcaccagccccactcagagcttgctggtggactcccaggccagtaagacgctgcccatcccaaccagcgctcccgtcgctctctcctccacggggaagcccgttctggatgcagggccagtgctcttctgggtgatcctggtgttggttgtggtggtcggctccagcgccttcctcctgtgccaccggagggcctgcaggaagcgaattcggcagaagctccacctgtgctacccggtccagacctcccagcccaagctagagcttgtggattccagacccaggaggagctcaacgcagctgaggagtggtgcgtcggtgacagaacccgtcgcggaagagcgagggttaatgagccagccactgatggagacctgccacagcgtgggggcagcctacctggagagcctgccgctgcaggatgccagcccggccgggggcccctcgtcccccagggaccttcctgagccccgggtgtccacggagcacaccaataacaagattgagaaaatctacatcatgaaggctgacaccgtgatcgtggggaccgtgaaggctgagctgccggagggccggggcctggcggggccagcagagcccgagttggaggaggagctggaggcggaccataccccccactaccccgagcaggagacagaaccgcctctgggcagctgcagcgatgtcatgctctcagtggaagaggaagggaaagaagaccccttgcccacagctgcctctggaaagtga

SEQ ID NO: 286 - DNA, 1407 bp, Homo sapiens
  misc_feature 1..1407: note = TNFRSF10A
  source 1..1407: mol_type = genomic DNA
atggcgccaccaccagctagagtacatctaggtgcgttcctggcagtgactccgaatcccgggagcgcagcgagtgggacagaggcagccgcggccacacccagcaaagtgtggggctcttccgcggggaggattgaaccacgaggcgggggccgaggagcgctccctacctccatgggacagcacggacccagtgcccgggcccgggcagggcgcgccccaggacccaggccggcgcgggaagccagccctcggctccgggtccacaagaccttcaagtttgtcgtcgtcggggtcctgctgcaggtcgtacctagctcagctgcaaccatcaaacttcatgatcaatcaattggcacacagcaatgggaacatagccctttgggagagttgtgtccaccaggatctcatagatcagaacatcctggagcctgtaaccggtgcacagagggtgtgggttacaccaatgcttccaacaatttgtttgcttgcctcccatgtacagcttgtaaatcagatgaagaagagagaagtccctgcaccacgaccaggaacacagcatgtcagtgcaaaccaggaactttccggaatgacaattctgctgagatgtgccggaagtgcagcagagggtgccccagagggatggtcaaggtcaaggattgtacgccctggagtgacatcgagtgtgtccacaaagaatcaggcaatggacataatatatgggtgattttggttgtgactttggttgttccgttgctgttggtggctgtgctgattgtctgttgttgcatcggctcaggttgtggaggggaccccaagtgcatggacagggtgtgtttctggcgcttgggtctcctacgagggcctggggctgaggacaatgctcacaacgagattctgagcaacgcagactcgctgtccactttcgtctctgagcagcaaatggaaagccaggagccggcagatttgacaggtgtcactgtacagtccccaggggaggcacagtgtctgctgggaccggcagaagctgaagggtctcagaggaggaggctgctggttccagcaaatggtgctgaccccactgagactctgatgctgttctttgacaagtttgcaaacatcgtgccctttgactcctgggaccagctcatgaggcagctggacctcacgaaaaatgagatcgatgtggtcagagctggtacagcaggcccaggggatgccttgtatgcaatgctgatgaaatgggtcaacaaaactggacggaacgcctcgatccacaccctgctggatgccttggagaggatggaagagagacatgcaagagagaagattcaggacctcttggtggactctggaaagttcatctacttagaagatggcacaggctctgccgtgtccttggagtga

SEQ ID NO: 287 - DNA, 1323 bp, Homo sapiens
  misc_feature 1..1323: note = TNFRSF10B
  source 1..1323: mol_type = genomic DNA
atggaacaacggggacagaacgccccggccgcttcgggggcccggaaaaggcacggcccaggacccagggaggcgcggggagccaggcctgggccccgggtccccaagacccttgtgctcgttgtcgccgcggtcctgctgttggtctcagctgagtctgctctgatcacccaacaagacctagctccccagcagagagcggccccacaacaaaagaggtccagcccctcagagggattgtgtccacctggacaccatatctcagaagacggtagagattgcatctcctgcaaatatggacaggactatagcactcactggaatgacctccttttctgcttgcgctgcaccaggtgtgattcaggtgaagtggagctaagtccctgcaccacgaccagaaacacagtgtgtcagtgcgaagaaggcaccttccgggaagaagattctcctgagatgtgccggaagtgccgcacagggtgtcccagagggatggtcaaggtcggtgattgtacaccctggagtgacatcgaatgtgtccacaaagaatcaggtacaaagcacagtggggaagtcccagctgtggaggagacggtgacctccagcccagggactcctgcctctccctgttctctctcaggcatcatcataggagtcacagttgcagccgtagtcttgattgtggctgtgtttgtttgcaagtctttactgtggaagaaagtccttccttacctgaaaggcatctgctcaggtggtggtggggaccctgagcgtgtggacagaagctcacaacgacctggggctgaggacaatgtcctcaatgagatcgtgagtatcttgcagcccacccaggtccctgagcaggaaatggaagtccaggagccagcagagccaacaggtgtcaacatgttgtcccccggggagtcagagcatctgctggaaccggcagaagctgaaaggtctcagaggaggaggctgctggttccagcaaatgaaggtgatcccactgagactctgagacagtgcttcgatgactttgcagacttggtgccctttgactcctgggagccgctcatgaggaagttgggcctcatggacaatgagataaaggtggctaaagctgaggcagcgggccacagggacaccttgtacacgatgctgataaagtgggtcaacaaaaccgggcgagatgcctctgtccacaccctgctggatgccttggagacgctgggagagagacttgccaagcagaagattgaggaccacttgttgagctctggaaagttcatgtatctagaaggtaatgcagactctgccatgtcctaa

SEQ ID NO: 288 - DNA, 780 bp, Homo sapiens
  misc_feature 1..780: note = TNFRSF10C
  source 1..780: mol_type = genomic DNA
atggcccggatccccaagaccctaaagttcgtcgtcgtcatcgtcgcggtcctgctgccagtcctagcttactctgccaccactgcccggcaggaggaagttccccagcagacagtggccccacagcaacagaggcacagcttcaagggggaggagtgtccagcaggatctcatagatcagaacatactggagcctgtaacccgtgcacagagggtgtggattacaccaacgcttccaacaatgaaccttcttgcttcccatgtacagtttgtaaatcagatcaaaaacataaaagttcctgcaccatgaccagagacacagtgtgtcagtgtaaagaaggcaccttccggaatgaaaactccccagagatgtgccggaagtgtagcaggtgccctagtggggaagtccaagtcagtaattgtacgtcctgggatgatatccagtgtgttgaagaatttggtgccaatgccactgtggaaaccccagctgctgaagagacaatgaacaccagcccggggactcctgccccagctgctgaagagacaatgaacaccagcccagggactcctgccccagctgctgaagagacaatgaccaccagcccggggactcctgccccagctgctgaagagacaatgaccaccagcccggggactcctgccccagctgctgaagagacaatgaccaccagcccggggactcctgcctcttctcattacctctcatgcaccatcgtagggatcatagttctaattgtgcttctgattgtgtttgtttga

SEQ ID NO: 289 - DNA, 1161 bp, Homo sapiens
  misc_feature 1..1161: note = TNFRSF10D
  source 1..1161: mol_type = genomic DNA
atgggactttggggacaaagcgtcccgaccgcctcgagcgctcgagcagggcgctatccaggagccaggacagcgtcgggaaccagaccatggctcctggaccccaagatccttaagttcgtcgtcttcatcgtcgcggttctgctgccggtccgggttgactctgccaccatcccccggcaggacgaagttccccagcagacagtggccccacagcaacagaggcgcagcctcaaggaggaggagtgtccagcaggatctcatagatcagaatatactggagcctgtaacccgtgcacagagggtgtggattacaccattgcttccaacaatttgccttcttgcctgctatgtacagtttgtaaatcaggtcaaacaaataaaagttcctgtaccacgaccagagacaccgtgtgtcagtgtgaaaaaggaagcttccaggataaaaactcccctgagatgtgccggacgtgtagaacagggtgtcccagagggatggtcaaggtcagtaattgtacgccccggagtgacatcaagtgcaaaaatgaatcagctgccagttccactgggaaaaccccagcagcggaggagacagtgaccaccatcctggggatgcttgcctctccctatcactaccttatcatcatagtggttttagtcatcattttagctgtggttgtggttggcttttcatgtcggaagaaattcatttcttacctcaaaggcatctgctcaggtggtggaggaggtcccgaacgtgtgcacagagtccttttccggcggcgttcatgtccttcacgagttcctggggcggaggacaatgcccgcaacgagaccctgagtaacagatacttgcagcccacccaggtctctgagcaggaaatccaaggtcaggagctggcagagctaacaggtgtgactgtagagttgccagaggagccacagcgtctgctggaacaggcagaagctgaagggtgtcagaggaggaggctgctggttccagtgaatgacgctgactccgctgacatcagcaccttgctggatgcctcggcaacactggaagaaggacatgcaaaggaaacaattcaggaccaactggtgggctccgaaaagctcttttatgaagaagatgaggcaggctctgctacgtcctgcctgtga

SEQ ID NO: 290 - DNA, 1851 bp, Homo sapiens
  misc_feature 1..1851: note = TNFRSF11A
  source 1..1851: mol_type = genomic DNA
atggccccgcgcgcccggcggcgccgcccgctgttcgcgctgctgctgctctgcgcgctgctcgcccggctgcaggtggctttgcagatcgctcctccatgtaccagtgagaagcattatgagcatctgggacggtgctgtaacaaatgtgaaccaggaaagtacatgtcttctaaatgcactactacctctgacagtgtatgtctgccctgtggcccggatgaatacttggatagctggaatgaagaagataaatgcttgctgcataaagtttgtgatacaggcaaggccctggtggccgtggtcgccggcaacagcacgaccccccggcgctgcgcgtgcacggctgggtaccactggagccaggactgcgagtgctgccgccgcaacaccgagtgcgcgccgggcctgggcgcccagcacccgttgcagctcaacaaggacacagtgtgcaaaccttgccttgcaggctacttctctgatgccttttcctccacggacaaatgcagaccctggaccaactgtaccttccttggaaagagagtagaacatcatgggacagagaaatccgatgcggtttgcagttcttctctgccagctagaaaaccaccaaatgaaccccatgtttacttgcccggtttaataattctgcttctcttcgcgtctgtggccctggtggctgccatcatctttggcgtttgctataggaaaaaagggaaagcactcacagctaatttgtggcactggatcaatgaggcttgtggccgcctaagtggagataaggagtcctcaggtgacagttgtgtcagtacacacacggcaaactttggtcagcagggagcatgtgaaggtgtcttactgctgactctggaggagaagacatttccagaagatatgtgctacccagatcaaggtggtgtctgtcagggcacatgtgtaggaggtggtccctacgcacaaggcgaagatgccaggatgctctcattggtcagcaagaccgagatagaggaagacagcttcagacagatgcccacagaagatgaatacatggacaggccctcccagcccacagaccagttactgttcctcactgagcctggaagcaaatccacacctcctttctctgaacccctggaggtgggggagaatgacagtttaagccagtgcttcacggggacacagagcacagtgggttcagaaagctgcaactgcactgagcccctgtgcaggactgattggactcccatgtcctctgaaaactacttgcaaaaagaggtggacagtggccattgcccgcactgggcagccagccccagccccaactgggcagatgtctgcacaggctgccggaaccctcctggggaggactgtgaacccctcgtgggttccccaaaacgtggacccttgccccagtgcgcctatggcatgggccttccccctgaagaagaagccagcaggacggaggccagagaccagcccgaggatggggctgatgggaggctcccaagctcagcgagggcaggtgccgggtctggaagctcccctggtggccagtcccctgcatctggaaatgtgactggaaacagtaactccacgttcatctccagcgggcaggtgatgaacttcaagggcgacatcatcgtggtctacgtcagccagacctcgcaggagggcgcggcggcggctgcggagcccatgggccgcccggtgcaggaggagaccctggcgcgccgagactccttcgcggggaacggcccgcgcttcccggacccgtgcggcggccccgaggggctgcgggagccggagaaggcctcgaggccggtgcaggagcaaggcggggccaaggcttga

SEQ ID NO: 291 - DNA, 1206 bp, Homo sapiens
  misc_feature 1..1206: note = TNFRSF11B
  source 1..1206: mol_type = genomic DNA
atgaacaacttgctgtgctgcgcgctcgtgtttctggacatctccattaagtggaccacccaggaaacgtttcctccaaagtaccttcattatgacgaagaaacctctcatcagctgttgtgtgacaaatgtcctcctggtacctacctaaaacaacactgtacagcaaagtggaagaccgtgtgcgccccttgccctgaccactactacacagacagctggcacaccagtgacgagtgtctatactgcagccccgtgtgcaaggagctgcagtacgtcaagcaggagtgcaatcgcacccacaaccgcgtgtgcgaatgcaaggaagggcgctaccttgagatagagttctgcttgaaacataggagctgccctcctggatttggagtggtgcaagctggaaccccagagcgaaatacagtttgcaaaagatgtccagatgggttcttctcaaatgagacgtcatctaaagcaccctgtagaaaacacacaaattgcagtgtctttggtctcctgctaactcagaaaggaaatgcaacacacgacaacatatgttccggaaacagtgaatcaactcaaaaatgtggaatagatgttaccctgtgtgaggaggcattcttcaggtttgctgttcctacaaagtttacgcctaactggcttagtgtcttggtagacaatttgcctggcaccaaagtaaacgcagagagtgtagagaggataaaacggcaacacagctcacaagaacagactttccagctgctgaagttatggaaacatcaaaacaaagaccaagatatagtcaagaagatcatccaagatattgacctctgtgaaaacagcgtgcagcggcacattggacatgctaacctcaccttcgagcagcttcgtagcttgatggaaagcttaccgggaaagaaagtgggagcagaagacattgaaaaaacaataaaggcatgcaaacccagtgaccagatcctgaagctgctcagtttgtggcgaataaaaaatggcgaccaagacaccttgaagggcctaatgcacgcactaaagcactcaaagacgtaccactttcccaaaactgtcactcagagtctaaagaagaccatcaggttccttcacagcttcacaatgtacaaattgtatcagaagttatttttagaaatgataggtaaccaggtccaatcagtaaaaataagctgcttataa

SEQ ID NO: 292 - DNA, 390 bp, Homo sapiens
  misc_feature 1..390: note = TNFRSF12A
  source 1..390: mol_type = genomic DNA
atggctcggggctcgctgcgccggttgctgcggctcctcgtgctggggctctggctggcgttgctgcgctccgtggccggggagcaagcgccaggcaccgccccctgctcccgcggcagctcctggagcgcggacctggacaagtgcatggactgcgcgtcttgcagggcgcgaccgcacagcgacttctgcctgggctgcgctgcagcacctcctgcccccttccggctgctttggcccatccttgggggcgctctgagcctgaccttcgtgctggggctgctttctggctttttggtctggagacgatgccgcaggagagagaagttcaccacccccatagaggagaccggcggagagggctgcccagctgtggcgctgatccagtga

SEQ ID NO: 293 - DNA, 882 bp, Homo sapiens
  misc_feature 1..882: note = TNFRSF13B
  source 1..882: mol_type = genomic DNA
atgagtggcctgggccggagcaggcgaggtggccggagccgtgtggaccaggaggagcgctttccacagggcctgtggacgggggtggctatgagatcctgccccgaagagcagtactgggatcctctgctgggtacctgcatgtcctgcaaaaccatttgcaaccatcagagccagcgcacctgtgcagccttctgcaggtcactcagctgccgcaaggagcaaggcaagttctatgaccatctcctgagggactgcatcagctgtgcctccatctgtggacagcaccctaagcaatgtgcatacttctgtgagaacaagctcaggagcccagtgaaccttccaccagagctcaggagacagcggagtggagaagttgaaaacaattcagacaactcgggaaggtaccaaggattggagcacagaggctcagaagcaagtccagctctcccggggctgaagctgagtgcagatcaggtggccctggtctacagcacgctggggctctgcctgtgtgccgtcctctgctgcttcctggtggcggtggcctgcttcctcaagaagaggggggatccctgctcctgccagccccgctcaaggccccgtcaaagtccggccaagtcttcccaggatcacgcgatggaagccggcagccctgtgagcacatcccccgagccagtggagacctgcagcttctgcttccctgagtgcagggcgcccacgcaggagagcgcagtcacgcctgggacccccgaccccacttgtgctggaaggtgggggtgccacaccaggaccacagtcctgcagccttgcccacacatcccagacagtggccttggcattgtgtgtgtgcctgcccaggaggggggcccaggtgcataa

SEQ ID NO: 294 - DNA, 555 bp, Homo sapiens
  misc_feature 1..555: note = TNFRSF13C
  source 1..555: mol_type = genomic DNA
atgaggcgagggccccggagcctgcggggcagggacgcgccagcccccacgccctgcgtcccggccgagtgcttcgacctgctggtccgccactgcgtggcctgcgggctcctgcgcacgccgcggccgaaaccggccggggccagcagccctgcgcccaggacggcgctgcagccgcaggagtcggtgggcgcgggggccggcgaggcggcgctgcccctgcccgggctgctctttggcgcccccgcgctgctgggcctggcactggtcctggcgctggtcctggtgggtctggtgagctggaggcggcgacagcggcggcttcgcggcgcgtcctccgcagaggcccccgacggagacaaggacgccccagagcccctggacaaggtcatcattctgtctccgggaatctctgatgccacagctcctgcctggcctcctcctggggaagacccaggaaccaccccacctggccacagtgtccctgtgccagccacagagctgggctccactgaactggtgaccaccaagacggccggccctgagcaacaatag

SEQ ID NO: 295 - DNA, 852 bp, Homo sapiens
  misc_feature 1..852: note = TNFRSF14
  source 1..852: mol_type = genomic DNA
atggagcctcctggagactgggggcctcctccctggagatccacccccaaaaccgacgtcttgaggctggtgctgtatctcaccttcctgggagccccctgctacgccccagctctgccgtcctgcaaggaggacgagtacccagtgggctccgagtgctgccccaagtgcagtccaggttatcgtgtgaaggaggcctgcggggagctgacgggcacagtgtgtgaaccctgccctccaggcacctacattgcccacctcaatggcctaagcaagtgtctgcagtgccaaatgtgtgacccagccatgggcctgcgcgcgagccggaactgctccaggacagagaacgccgtgtgtggctgcagcccaggccacttctgcatcgtccaggacggggaccactgcgccgcgtgccgcgcttacgccacctccagcccgggccagagggtgcagaagggaggcaccgagagtcaggacaccctgtgtcagaactgccccccggggaccttctctcccaatgggaccctggaggaatgtcagcaccagaccaagtgcagctggctggtgacgaaggccggagctgggaccagcagctcccactgggtatggtggtttctctcagggagcctcgtcatcgtcattgtttgctccacagttggcctaatcatatgtgtgaaaagaagaaagccaaggggtgatgtagtcaaggtgatcgtctccgtccagcggaaaagacaggaggcagaaggtgaggccacagtcattgaggccctgcaggcccctccggacgtcaccacggtggccgtggaggagacaataccctcattcacggggaggagcccaaaccactga

SEQ ID NO: 296 - DNA, 1284 bp, Homo sapiens
  misc_feature 1..1284: note = NGFR
  source 1..1284: mol_type = genomic DNA
atgggggcaggtgccaccggccgcgccatggacgggccgcgcctgctgctgttgctgcttctgggggtgtcccttggaggtgccaaggaggcatgccccacaggcctgtacacacacagcggtgagtgctgcaaagcctgcaacctgggcgagggtgtggcccagccttgtggagccaaccagaccgtgtgtgagccctgcctggacagcgtgacgttctccgacgtggtgagcgcgaccgagccgtgcaagccgtgcaccgagtgcgtggggctccagagcatgtcggcgccgtgcgtggaggccgacgacgccgtgtgccgctgcgcctacggctactaccaggatgagacgactgggcgctgcgaggcgtgccgcgtgtgcgaggcgggctcgggcctcgtgttctcctgccaggacaagcagaacaccgtgtgcgaggagtgccccgacggcacgtattccgacgaggccaaccacgtggacccgtgcctgccctgcaccgtgtgcgaggacaccgagcgccagctccgcgagtgcacacgctgggccgacgccgagtgcgaggagatccctggccgttggattacacggtccacacccccagagggctcggacagcacagcccccagcacccaggagcctgaggcacctccagaacaagacctcatagccagcacggtggcaggtgtggtgaccacagtgatgggcagctcccagcccgtggtgacccgaggcaccaccgacaacctcatccctgtctattgctccatcctggctgctgtggttgtgggccttgtggcctacatagccttcaagaggtggaacagctgcaagcagaacaagcaaggagccaacagccggccagtgaaccagacgcccccaccagagggagaaaaactccacagcgacagtggcatctccgtggacagccagagcctgcatgaccagcagccccacacgcagacagcctcgggccaggccctcaagggtgacggaggcctctacagcagcctgcccccagccaagcgggaggaggtggagaagcttctcaacggctctgcgggggacacctggcggcacctggcgggcgagctgggctaccagcccgagcacatagactcctttacccatgaggcctgccccgttcgcgccctgcttgcaagctgggccacccaggacagcgccacactggacgccctcctggccgccctgcgccgcatccagcgagccgacctcgtggagagtctgtgcagtgagtccactgccacatccccggtgtga

SEQ ID NO: 297 - DNA, 555 bp, Homo sapiens
  misc_feature 1..555: note = TNFRSF17
  source 1..555: mol_type = genomic DNA
atgttgcagatggctgggcagtgctcccaaaatgaatattttgacagtttgttgcatgcttgcataccttgtcaacttcgatgttcttctaatactcctcctctaacatgtcagcgttattgtaatgcaagtgtgaccaattcagtgaaaggaacgaatgcgattctctggacctgtttgggactgagcttaataatttctttggcagttttcgtgctaatgtttttgctaaggaagataaactctgaaccattaaaggacgagtttaaaaacacaggatcaggtctcctgggcatggctaacattgacctggaaaagagcaggactggtgatgaaattattcttccgagaggcctcgagtacacggtggaagaatgcacctgtgaagactgcatcaagagcaaaccgaaggtcgactctgaccattgctttccactcccagctatggaggaaggcgcaaccattcttgtcaccacgaaaacgaatgactattgcaagagcctgccagctgctttgagtgctacggagatagagaaatcaatttctgctaggtaa

SEQ ID NO: 298 - DNA, 1254 bp, Homo sapiens
  misc_feature 1..1254: note = TNFRSF19
  source 1..1254: mol_type = genomic DNA
atggctttaaaagtgctactagaacaagagaaaacgtttttcactcttttagtattactaggctatttgtcatgtaaagtgacttgtgaatcaggagactgtagacagcaagaattcagggatcggtctggaaactgtgttccctgcaaccagtgtgggccaggcatggagttgtctaaggaatgtggcttcggctatggggaggatgcacagtgtgtgacgtgccggctgcacaggttcaaggaggactggggcttccagaaatgcaagccctgtctggactgcgcagtggtgaaccgctttcagaaggcaaattgttcagccaccagtgatgccatctgcggggactgcttgccaggattttataggaagacgaaacttgtcggctttcaagacatggagtgtgtgccttgtggagaccctcctcctccttacgaaccgcactgtgccagcaaggtcaacctcgtgaagatcgcgtccacggcctccagcccacgggacacggcgctggctgccgttatctgcagcgctctggccaccgtcctgctggccctgctcatcctctgtgtcatctattgtaagagacagtttatggagaagaaacccagctggtctctgcggtcacaggacattcagtacaacggctctgagctgtcgtgttttgacagacctcagctccacgaatatgcccacagagcctgctgccagtgccgccgtgactcagtgcagacctgcgggccggtgcgcttgctcccatccatgtgctgtgaggaggcctgcagccccaacccggcgactcttggttgtggggtgcattctgcagccagtcttcaggcaagaaacgcaggcccagccggggagatggtgccgactttcttcggatccctcacgcagtccatctgtggcgagttttcagatgcctggcctctgatgcagaatcccatgggtggtgacaacatctctttttgtgactcttatcctgaactcactggagaagacattcattctctcaatccagaacttgaaagctcaacgtctttggattcaaatagcagtcaagatttggttggtggggctgttccagtccagtctcattctgaaaactttacagcagctactgatttatctagatataacaacacactggtagaatcagcatcaactcaggatgcactaactatgagaagccagctagatcaggagagtggtgctgtcatccacccagccactcagacgtccctccaggaagcttaa

SEQ ID NO: 299 - DNA, 1293 bp, Homo sapiens
  misc_feature 1..1293: note = RELT
  source 1..1293: mol_type = genomic DNA
atgaagccaagtctgctgtgccggcccctgtcctgcttccttatgctgctgccctggcctctcgccaccctgacatcaacaaccctttggcagtgcccacctggggaggagcccgacctggacccagggcagggcacattatgcaggccctgccccccaggcaccttctcagctgcatggggctccagcccatgccagccccatgcccgttgcagcctttggaggaggctggaggcccaggtgggcatggcaactcgagatacactctgtggagactgctggcctgggtggtttgggccttggggggttccccgcgttccatgtcaaccatgttcctgggcacctctgggtactcatggctgtgatgagtgggggcggcgggcccgacgtggcgtggaggtggcagcaggggccagcagcggtggtgagacacggcagcctgggaacggcacccgggcaggtggcccagaggagacagccgcccagtacgcggtcatcgccatcgtccctgtcttctgcctcatggggctgttgggcatcctggtgtgcaacctcctcaagcggaagggctaccactgcacggcgcacaaggaggtcgggcccggccctggaggtggaggcagtggaatcaaccctgcctaccggactgaggatgccaatgaggacaccattggggtcctggtgcgcttgatcacagagaagaaagagaatgctgcggccctggaggagctgctgaaagagtaccacagcaaacagctggtgcagacgagccacaggcctgtgtccaagctgccgccagcgcccccgaacgtgccacacatctgcccgcaccgccaccatctccacaccgtgcagggcctggcctcgctctctggcccctgctgctcccgctgtagccagaagaagtggcccgaggtgctgctgtcccctgaggctgtagccgccactactcctgttcccagccttctgcctaacccgaccagggttcccaaggccggggccaaggcagggcgtcagggcgagatcaccatcttgtctgtgggcaggttccgcgtggctcgaattcctgagcagcggacaagttcaatggtgtctgaggtgaagaccatcacggaggctgggccctcgtggggtgatctccctgactccccacagcctggcctcccccctgagcagcaggccctgctaggaagtggcggaagccgtacaaagtggctgaagcccccagcagagaacaaggccgaggagaaccgctatgtggtccggctaagtgagagcaacctggtcatctga

SEQ ID NO: 300 - DNA, 1968 bp, Homo sapiens
  misc_feature 1..1968: note = TNFRSF21
  source 1..1968: mol_type = genomic DNA
atggggacctctccgagcagcagcaccgccctcgcctcctgcagccgcatcgcccgccgagccacagccacgatgatcgcgggctcccttctcctgcttggattccttagcaccaccacagctcagccagaacagaaggcctcgaatctcattggcacataccgccatgttgaccgtgccaccggccaggtgctaacctgtgacaagtgtccagcaggaacctatgtctctgagcattgtaccaacacaagcctgcgcgtctgcagcagttgccctgtggggacctttaccaggcatgagaatggcatagagaaatgccatgactgtagtcagccatgcccatggccaatgattgagaaattaccttgtgctgccttgactgaccgagaatgcacttgcccacctggcatgttccagtctaacgctacctgtgccccccatacggtgtgtcctgtgggttggggtgtgcggaagaaagggacagagactgaggatgtgcggtgtaagcagtgtgctcggggtaccttctcagatgtgccttctagtgtgatgaaatgcaaagcatacacagactgtctgagtcagaacctggtggtgatcaagccggggaccaaggagacagacaacgtctgtggcacactcccgtccttctccagctccacctcaccttcccctggcacagccatctttccacgccctgagcacatggaaacccatgaagtcccttcctccacttatgttcccaaaggcatgaactcaacagaatccaactcttctgcctctgttagaccaaaggtactgagtagcatccaggaagggacagtccctgacaacacaagctcagcaagggggaaggaagacgtgaacaagaccctcccaaaccttcaggtagtcaaccaccagcaaggcccccaccacagacacatcctgaagctgctgccgtccatggaggccactgggggcgagaagtccagcacgcccatcaagggccccaagaggggacatcctagacagaacctacacaagcattttgacatcaatgagcatttgccctggatgattgtgcttttcctgctgctggtgcttgtggtgattgtggtgtgcagtatccggaaaagctcgaggactctgaaaaaggggccccggcaggatcccagtgccattgtggaaaaggcagggctgaagaaatccatgactccaacccagaaccgggagaaatggatctactactgcaatggccatggtatcgatatcctgaagcttgtagcagcccaagtgggaagccagtggaaagatatctatcagtttctttgcaatgccagtgagagggaggttgctgctttctccaatgggtacacagccgaccacgagcgggcctacgcagctctgcagcactggaccatccggggccccgaggccagcctcgcccagctaattagcgccctgcgccagcaccggagaaacgatgttgtggagaagattcgtgggctgatggaagacaccacccagctggaaactgacaaactagctctcccgatgagccccagcccgcttagcccgagccccatccccagccccaacgcgaaacttgagaattccgctctcctgacggtggagccttccccacaggacaagaacaagggcttcttcgtggatgagtcggagccccttctccgctgtgactctacatccagcggctcctccgcgctgagcaggaacggttcctttattaccaaagaaaagaaggacacagtgttgcggcaggtacgcctggacccctgtgacttgcagcctatctttgatgacatgctccactttctaaatcctgaggagctgcgggtgattgaagagattccccaggctgaggacaaactagaccggctattcgaaattattggagtcaagagccaggaagccagccagaccctcctggactctgtttatagccatcttcctgacctgctgtag

SEQ ID NO: 301 - DNA, 1254 bp, Homo sapiens
  misc_feature 1..1254: note = TNFRSF25
  source 1..1254: mol_type = genomic DNA
atggagcagcggccgcggggctgcgcggcggtggcggcggcgctcctcctggtgctgctgggggcccgggcccagggcggcactcgtagccccaggtgtgactgtgccggtgacttccacaagaagattggtctgttttgttgcagaggctgcccagcggggcactacctgaaggccccttgcacggagccctgcggcaactccacctgccttgtgtgtccccaagacaccttcttggcctgggagaaccaccataattctgaatgtgcccgctgccaggcctgtgatgagcaggcctcccaggtggcgctggagaactgttcagcagtggccgacacccgctgtggctgtaagccaggctggtttgtggagtgccaggtcagccaatgtgtcagcagttcacccttctactgccaaccatgcctagactgcggggccctgcaccgccacacacggctactctgttcccgcagagatactgactgtgggacctgcctgcctggcttctatgaacatggcgatggctgcgtgtcctgccccacgagcaccctggggagctgtccagagcgctgtgccgctgtctgtggctggaggcagatgttctgggtccaggtgctcctggctggccttgtggtccccctcctgcttggggccaccctgacctacacataccgccactgctggcctcacaagcccctggttactgcagatgaagctgggatggaggctctgaccccaccaccggccacccatctgtcacccttggacagcgcccacacccttctagcacctcctgacagcagtgagaagatctgcaccgtccagttggtgggtaacagctggacccctggctaccccgagacccaggaggcgctctgcccgcaggtgacatggtcctgggaccagttgcccagcagagctcttggccccgctgctgcgcccacactctcgccagagtccccagccggctcgccagccatgatgctgcagccgggcccgcagctctacgacgtgatggacgcggtcccagcgcggcgctggaaggagttcgtgcgcacgctggggctgcgcgaggcagagatcgaagccgtggaggtggagatcggccgcttccgagaccagcagtacgagatgctcaagcgctggcgccagcagcagcccgcgggcctcggagccgtttacgcggccctggagcgcatggggctggacggctgcgtggaagacttgcgcagccgcctgcagcgcggcccgtga

SEQ ID NO: 302 - DNA, 1347 bp, Homo sapiens
  misc_feature 1..1347: note = EDAR
  source 1..1347: mol_type = genomic DNA
atggcccatgtgggggactgcacgcagacgccctggctccccgtcctggtggtgtctctgatgtgctcagcccgagcggaatactcaaactgcggtgagaacgagtactacaaccagactacggggctgtgccaggagtgccccccgtgtgggccgggagaggagccctacctgtcctgtggctacggcaccaaagacgaggactacggctgcgtcccctgcccggcggagaagttttccaaaggaggctaccagatatgcaggcgtcacaaagactgtgagggcttcttccgggccaccgtgctgacaccaggggacatggagaatgacgctgagtgtggcccttgcctccctggctactacatgctggagaacagaccgaggaacatctatggcatggtctgctactcctgcctcctggcaccccccaacaccaaggaatgtgtgggagccacttcaggagcttctgccaacttccctggcacctcgggcagcagcaccctgtctcccttccagcacgcccacaaagaactctcaggccaaggacacctggccactgccctgatcattgcaatgtccaccatcttcatcatggccatcgccatcgtcctcatcatcatgttctacatcctgaagacaaagccctctgccccagcctgttgcaccagccacccggggaagagcgtggaggcccaagtgagcaaggacgaggagaagaaagaggccccagacaacgtggtgatgttctccgagaaggatgaatttgagaagctgacagcaactccagcaaagcccaccaagagcgagaacgatgcctcatccgagaatgagcagctgctgagccggagcgtcgacagtgatgaggagcccgcccctgacaagcagggctccccggagctgtgcctgctgtcgctggttcacctggccagggagaagtctgccaccagcaacaagtcagccgggattcaaagccggaggaaaaagatcctcgatgtgtatgccaacgtgtgtggagtcgtggaaggtcttagccccacggagctgccatttgattgcctcgagaagactagccgaatgctcagctccacgtacaactctgagaaggctgttgtgaaaacgtggcgccacctcgccgagagcttcggcctgaagagggatgagattgggggcatgacagacggcatgcaactctttgaccgcatcagcacggcaggctacagcatccctgagctactcacaaaactggtgcagattgagcggctggatgctgtggagtccttgtgtgcagacatactggagtgggcgggggttgtgccacctgcctcccagccacatgctgcatcctga

SEQ ID NO: 303 - DNA, 894 bp, Homo sapiens
  misc_feature 1..894: note = EDA2R
  source 1..894: mol_type = genomic DNA
atggattgccaagaaaatgagtactgggaccaatggggacggtgtgtcacctgccaacggtgtggtcctggacaggagctatccaaggattgtggttatggagagggtggagatgcctactgcacagcctgccctcctcgcaggtacaaaagcagctggggccaccacagatgtcagagttgcatcacctgtgctgtcatcaatcgtgttcagaaggtcaactgcacagctacctctaatgctgtctgtggggactgtttgcccaggttctaccgaaagacacgcattggaggcctgcaggaccaagagtgcatcccgtgcacgaagcagacccccacctctgaggttcaatgtgccttccagttgagcttagtggaggcagatacacccacagtgccccctcaggaggccacacttgttgcactggtgagcagcctgctagtggtgtttaccctggccttcctggggctcttcttcctctactgcaagcagttcttcaacagacattgccagcgtggaggtttgctgcagtttgaggctgataaaacagcaaaggaggaatctctcttccccgtgccacccagcaaggagaccagtgctgagtcccaagtgagtgagaacatctttcagacccagccacttaaccctatcctcgaggacgactgcagctcgactagtggcttccccacacaggagtcctttaccatggcctcctgcacctcagagagccactcccactgggtccacagccccatcgaatgcacagagctggacctgcaaaagttttccagctctgcctcctatactggagctgagaccttggggggaaacacagtcgaaagcactggagacaggctggagctcaatgtgccctttgaagttcccagcccttaa

SEQ ID NO: 304 - DNA, 1137 bp, synthetic construct
  misc_feature 1..1137: note = STING (R232 Allele)
  misc_feature 694..696: allele = nnn = CGT, CGC, CGA, CGG, AGA or AGG; note = allele - nnn = CGT, CGC, CGA, CGG, AGA or AGG
  source 1..1137: mol_type = other DNA
atgccccactccagcctgcatccatccatcccgtgtcccaggggtcacggggcccagaaggcagccttggttctgctgagtgcctgcctggtgaccctttgggggctaggagagccaccagagcacactctccggtacctggtgctccacctagcctccctgcagctgggactgctgttaaacggggtctgcagcctggctgaggagctgcgccacatccactccaggtaccggggcagctactggaggactgtgcgggcctgcctgggctgccccctccgccgtggggccctgttgctgctgtccatctatttctactactccctcccaaatgcggtcggcccgcccttcacttggatgcttgccctcctgggcctctcgcaggcactgaacatcctcctgggcctcaagggcctggccccagctgagatctctgcagtgtgtgaaaaagggaatttcaacgtggcccatgggctggcatggtcatattacatcggatatctgcggctgatcctgccagagctccaggcccggattcgaacttacaatcagcattacaacaacctgctacggggtgcagtgagccagcggctgtatattctcctcccattggactgtggggtgcctgataacctgagtatggctgaccccaacattcgcttcctggataaactgccccagcagaccggtgacnnngctggcatcaaggatcgggtttacagcaacagcatctatgagcttctggagaacgggcagcgggcgggcacctgtgtcctggagtacgccacccccttgcagactttgtttgccatgtcacaatacagtcaagctggctttagccgggaggataggcttgagcaggccaaactcttctgccggacacttgaggacatcctggcagatgcccctgagtctcagaacaactgccgcctcattgcctaccaggaacctgcagatgacagcagcttctcgctgtcccaggaggttctccggcacctgcggcaggaggaaaaggaagaggttactgtgggcagcttgaagacctcagcggtgcccagtacctccacgatgtcccaagagcctgagctcctcatcagtggaatggaaaagcccctccctctccgcacggatttctct

SEQ ID NO: 305 - protein, 379 aa, Homo sapiens [sequence omitted]

SEQ ID NO: 306 - protein, 379 aa, Homo sapiens
  REGION 1..379: note = Human STING (H232 Allele)
MPHSSLHPSIPCPRGHGAQKAALVLLSACLVTLWGLGEPPEHTLRYLVLHLASLQLGLLLNGVCSLAEELRHIHSRYRGSYWRTVRACLGCPLRRGALLLLSIYFYYSLPNAVGPPFTWMLALLGLSQALNILLGLKGLAPAEISAVCEKGNFNVAHGLAWSYYIGYLRLILPELQARIRTYNQHYNNLLRGAVSQRLYILLPLDCGVPDNLSMADPNIRFLDKLPQQTGDHAGIKDRVYSNSIYELLENGQRAGTCVLEYATPLQTLFAMSQYSQAGFSREDRLEQAKLFCRTLEDILADAPESQNNCRLIAYQEPADDSSFSLSQEVLRHLRQEEKEEVTVGSLKTSAVPSTSTMSQEPELLISGMEKPLPLRTDFS

SEQ ID NO: 307 - protein, 379 aa, Homo sapiens [sequence omitted]

SEQ ID NO: 308 - protein, 379 aa, Homo sapiens
  REGION 1..379: note = Human STING (HAQ allele; R71H/G230A/R293Q)
MPHSSLHPSIPCPRGHGAQKAALVLLSACLVTLWGLGEPPEHTLRYLVLHLASLQLGLLLNGVCSLAEELHHIHSRYRGSYWRTVRACLGCPLRRGALLLLSIYFYYSLPNAVGPPFTWMLALLGLSQALNILLGLKGLAPAEISAVCEKGNFNVAHGLAWSYYIGYLRLILPELQARIRTYNQHYNNLLRGAVSQRLYILLPLDCGVPDNLSMADPNIRFLDKLPQQTADHAGIKDRVYSNSIYELLENGQRAGTCVLEYATPLQTLFAMSQYSQAGFSREDRLEQAKLFCQTLEDILADAPESQNNCRLIAYQEPADDSSFSLSQEVLRHLRQEEKEEVTVGSLKTSAVPSTSTMSQEPELLISGMEKPLPLRTDFS

SEQ ID NO: 309 - protein, 379 aa, Homo sapiens
  REGION 1..379: note = Human STING (AQ allele; G230A/R293Q)
MPHSSLHPSIPCPRGHGAQKAALVLLSACLVTLWGLGEPPEHTLRYLVLHLASLQLGLLLNGVCSLAEELRHIHSRYRGSYWRTVRACLGCPLRRGALLLLSIYFYYSLPNAVGPPFTWMLALLGLSQALNILLGLKGLAPAEISAVCEKGNFNVAHGLAWSYYIGYLRLILPELQARIRTYNQHYNNLLRGAVSQRLYILLPLDCGVPDNLSMADPNIRFLDKLPQQTADHAGIKDRVYSNSIYELLENGQRAGTCVLEYATPLQTLFAMSQYSQAGFSREDRLEQAKLFCQTLEDILADAPESQNNCRLIAYQEPADDSSFSLSQEVLRHLRQEEKEEVTVGSLKTSAVPSTSTMSQEPELLISGMEKPLPLRTDFS

SEQ ID NO: 310 - protein, 1025 aa, Homo sapiens [sequence omitted]

SEQ ID NO: 311 - protein, 925 aa, Homo sapiens
  REGION 1..925: note = RIG-I/DDX58
MTTEQRRSLQAFQDYIRKTLDPTYILSYMAPWFREEEVQYIQAEKNNKGPMEAATLFLKFLLELQEEGWFRGFLDALDHAGYSGLYEAIESWDFKKIEKLEEYRLLLKRLQPEFKTRIIPTDIISDLSECLINQECEEILQICSTKGMMAGAEKLVECLLRSDKENWPKTLKLALEKERNKFSELWIVEKGIKDVETEDLEDKMETSDIQIFYQEDPECQNLSENSCPPSEVSDTNLYSPFKPRNYQLELALPAMKGKNTIICAPTGCGKTFVSLLICEHHLKKFPQGQKGKVVFFANQIPVYEQQKSVFSKYFERHGYRVTGISGATAENVPVEQIVENNDIIILTPQILVNNLKKGTIPSLSIFTLMIFDECHNTSKQHPYNMIMFNYLDQKLGGSSGPLPQVIGLTASVGVGDAKNTDEALDYICKLCASLDASVIATVKHNLEELEQVVYKPQKFFRKVESRISDKFKYIIAQLMRDTESLAKRICKDLENLSQIQNREFGTQKYEQWIVTVQKACMVFQMPDKDEESRICKALFLYTSHLRKYNDALIISEHARMKDALDYLKDFFSNVRAAGFDEIEQDLTQRFEEKLQELESVSRDPSNENPKLEDLCFILQEEYHLNPETITILFVKTRALVDALKNWIEGNPKLSFLKPGILTGRGKTNQNTGMTLPAQKCILDAFKASGDHNILIATSVADEGIDIAQCNLVILYEYVGNVIKMIQTRGRGRARGSKCFLLTSNAGVIEKEQINMYKEKMMNDSILRLQTWDEAVFREKILHIQTHEKFIRDSQEKPKPVPDKENKKLLCRKCKALACYTADVRVIEECHYTVLGDAFKECFVSRPHPKPKQFSSFEKRAKIFCARQNCSHDWGIHVKYKTFEIPVIKIESFVVEDIATGVQTLYSKWKDFHFEKIPFDPAEMSK

SEQ ID NO: 312 - protein, 427 aa, Homo sapiens
  REGION 1..427: note = IRF-3, isoform 1
MGTPKPRILPWLVSQLDLGQLEGVAWVNKSRTRFRIPWKHGLRQDAQQEDFGIFQAWAEATGAYVPGRDKPDLPTWKRNFRSALNRKEGLRLAEDRSKDPHDPHKIYEFVNSGVGDFSQPDTSPDTNGGGSTSDTQEDILDELLGNMVLAPLPDPGPPSLAVAPEPCPQPLRSPSLDNPTPFPNLGPSENPLKRLLVPGEEWEFEVTAFYRGRQVFQQTISCPEGLRLVGSEVGDRTLPGWPVTLPDPGMSLTDRGVMSYVRHVLSCLGGGLALWRAGQWLWAQRLGHCHTYWAVSEELLPNSGHGPDGEVPKDKEGGVFDLGPFIVDLITFTEGSGRSPRYALWFCVGESWPQDQPWTKRLVMVKVVPTCLRALVEMARVGGASSLENTVDLHISNSHPLSLTSDQYKAYLQDLVEGMDFQGPGES

SEQ ID NO: 313 - protein, 503 aa, Homo sapiens
  REGION 1..503: note = IRF-7, isoform A
MALAPERAAPRVLFGEWLLGEISSGCYEGLQWLDEARTCFRVPWKHFARKDLSEADARIFKAWAVARGRWPPSSRGGGPPPEAETAERAGWKTNFRCALRSTRRFVMLRDNSGDPADPHKVYALSRELCWREGPGTDQTEAEAPAAVPPPQGGPPGPFLAHTHAGLQAPGPLPAPAGDKGDLLLQAVQQSCLADHLLTASWGADPVPTKAPGEGQEGLPLTGACAGGPGLPAGELYGWAVETTPSPGPQPAALTTGEAAAPESPHQAEPYLSPSPSACTAVQEPSPGALDVTIMYKGRTVLQKVVGHPSCTFLYGPPDPAVRATDPQQVAFPSPAELPDQKQLRYTEELLRHVAPGLHLELRGPQLWARRMGKCKVYWEVGGPPGSASPSTPACLLPRNCDTPIFDFRVFFQELVEFRARQRRGSPRYTIYLGFGQDLSAGRPKEKSLVLVKLEPWLCRVHLEGTQREGVSSLDSSSLSLCLSSANSLYDDIECFLMELEQPA

SEQ ID NO: 314 - DNA, 1184 bp, synthetic construct
  misc_feature 1..1184: note = Elongation factor 1 (EF1) alpha promoter
  source 1..1184: mol_type = other DNA
cgtgaggctccggtgcccgtcagtgggcagagcgcacatcgcccacagtccccgagaagttggggggaggggtcggcaattgaaccggtgcctagagaaggtggcgcggggtaaactgggaaagtgatgtcgtgtactggctccgcctttttcccgagggtgggggagaaccgtatataagtgcagtagtcgccgtgaacgttctttttcgcaacgggtttgccgccagaacacaggtaagtgccgtgtgtggttcccgcgggcctggcctctttacgggttatggcccttgcgtgccttgaattacttccacctggctgcagtacgtgattcttgatcccgagcttcgggttggaagtgggtgggagagttcgaggccttgcgcttaaggagccccttcgcctcgtgcttgagttgaggcctggcctgggcgctggggccgccgcgtgcgaatctggtggcaccttcgcgcctgtctcgctgctttcgataagtctctagccatttaaaatttttgatgacctgctgcgacgctttttttctggcaagatagtcttgtaaatgcgggccaagatctgcacactggtatttcggtttttggggccgcgggcggcgacggggcccgtgcgtcccagcgcacatgttcggcgaggcggggcctgcgagcgcggccaccgagaatcggacgggggtagtctcaagctggccggcctgctctggtgcctggcctcgcgccgccgtgtatcgccccgccctgggcggcaaggctggcccggtcggcaccagttgcgtgagcggaaagatggccgcttcccggccctgctgcagggagctcaaaatggaggacgcggcgctcgggagagcgggcgggtgagtcacccacacaaaggaaaagggcctttccgtcctcagccgtcgcttcatgtgactccacggagtaccgggcgccgtccaggcacctcgattagttctcgagcttttggagtacgtcgtctttaggttggggggaggggttttatgcgatggagtttccccacactgagtgggtggagactgaagttaggccagcttggcacttgatgtaattctccttggaatttgccctttttgagtttggatcttggttcattctcaagcctcagacagtggttcaaagtttttttcttccatttcaggtgtcgtga

SEQ ID NO: 315 - DNA, 20 bp, synthetic construct
  misc_feature 1..20: note = pagp-1 primer
  source 1..20: mol_type = other DNA
gcgtgacggttctgagtgct

SEQ ID NO: 316 - DNA, 21 bp, synthetic construct
  misc_feature 1..21: note = pagp-2 primer
  source 1..21: mol_type = other DNA
cgtctttgctgccatcttccg

SEQ ID NO: 317 - DNA, 24 bp, synthetic construct
  misc_feature 1..24: note = pagp-3 primer
  source 1..24: mol_type = other DNA
acaataacgacgactccgataagg

SEQ ID NO: 318 - DNA, 24 bp, synthetic construct
  misc_feature 1..24: note = pagp-4 primer
  source 1..24: mol_type = other DNA
ctgctgaatgtgctgattaacctg

SEQ ID NO: 319 - DNA, 23 bp, synthetic construct
  misc_feature 1..23: note = ansb-1 primer
  source 1..23: mol_type = other DNA
accttagaagatagccgcaaagc

SEQ ID NO: 320 - DNA, 25 bp, synthetic construct
  misc_feature 1..25: note = ansb-2 primer
  source 1..25: mol_type = other DNA
cagagacatgacacccacgattatc

SEQ ID NO: 321 - DNA, 21 bp, synthetic construct
  misc_feature 1..21: note = ansb-3 primer
  source 1..21: mol_type = other DNA
gcaaaccgctatccagaacga

SEQ ID NO: 322 - DNA, 24 bp, synthetic construct
  misc_feature 1..24: note = ansb-4 primer
  source 1..24: mol_type = other DNA
agtttaagtatgccgtggtactgc

SEQ ID NO: 323 - DNA, 28 bp, synthetic construct
  misc_feature 1..28: note = csgd-1 primer
  source 1..28: mol_type = other DNA
cacttgctttaagatttgtaatggctag

SEQ ID NO: 324 - DNA, 24 bp, synthetic construct
  misc_feature 1..24: note = csgd-2 primer
  source 1..24: mol_type = other DNA
ggtgtattcgctttcccatttgtc

SEQ ID NO: 325 - DNA, 21 bp, synthetic construct
  misc_feature 1..21: note = csgd-3 primer
  source 1..21: mol_type = other DNA
tgtgctgtccaggttaatgcc

SEQ ID NO: 326 - DNA, 23 bp, synthetic construct
  misc_feature 1..23: note = csgd-4 primer
  source 1..23: mol_type = other DNA
gacgacggttttctcgaagtctc

SEQ ID NO: 327 - protein, 18 aa, synthetic construct
  REGION 1..18: note = T2A peptide
EGRGSLLTCGDVEENPGP

SEQ ID NO: 328 - protein, 19 aa, synthetic construct
  REGION 1..19: note = P2A peptide
ATNFSLLKQAGDVEENPGP

SEQ ID NO: 329 - protein, 20 aa, synthetic construct
  REGION 1..20: note = E2A peptide
QCTNYALLKLAGDVESNPGP

SEQ ID NO: 330 - protein, 22 aa, synthetic construct
  REGION 1..22: note = F2A peptide
VKQTLNFDLLKLAGDVESNPGP

SEQ ID NO: 331 - DNA, 3199 bp, synthetic construct
  misc_feature 1..3199: note = Plasmid pSL0191
  source 1..3199: mol_type = other DNA
gacgaaagggcctcgtgatacgcctatttttataggttaatgtcatgataataatggtttcttagacgtcaggtggcacttttcggggaaatgtgcgcggaacccctatttgtttatttttctaaatacattcaaatatgtatccgctcatgagacaataaccctgataaatgcttcaataatattgaaaaaggaagagtatgagtattcaacatttccgtgtcgcccttattcccttttttgcggcattttgccttcctgtttttgctcacccagaaacgctggtgaaagtaaaagatgctgaagatcagttgggtgcacgagtgggttacatcgaactggatctcaacagcggtaagatccttgagagttttcgccccgaagaacgttttccaatgatgagcacttttaaagttctgctatgtggcgcggtattatcccgtattgacgccgggcaagagcaactcggtcgccgcatacactattctcagaatgacttggttgagtactcaccagtcacagaaaagcatcttacggatggcatgacagtaagagaattatgcagtgctgccataaccatgagtgataacactgcggccaacttacttctgacaacgatcggaggaccgaaggagctaaccgcttttttgcacaacatgggggatcatgtaactcgccttgatcgttgggaaccggagctgaatgaagccataccaaacgacgagcgtgacaccacgatgcctgtagcaatggcaacaacgttgcgcaaactattaactggcgaactacttactctagcttcccggcaacaattaatagactggatggaggcggataaagttgcaggaccacttctgcgctcggcccttccggctggctggtttattgctgataaatctggagccggtgagcgtgggtctcgcggtatcattgcagcactggggccagatggtaagccctcccgtatcgtagttatctacacgacggggagtcaggcaactatggatgaacgaaatagacagatcgctgagataggtgcctcactgattaagcattggtaactgtcagaccaagtttactcatatatactttagattgatttaaaacttcatttttaatttaaaaggatctaggtgaagatcctttttgataatctcatgaccaaaatcccttaacgtgagttttcgttccactgagcgtcagaccccgtagaaaagatcaaaggatcttcttgagatcctttttttctgcgcgtaatctgctgcttgcaaacaaaaaaaccaccgctaccagcggtggtttgtttgccggatcaagagctaccaactctttttccgaaggtaactggcttcagcagagcgcagataccaaatactgttcttctagtgtagccgtagttaggccaccacttcaagaactctgtagcaccgcctacatacctcgctctgctaatcctgttaccagtggctgctgccagtggcgataagtcgtgtcttaccgggttggactcaagacgatagttaccggataaggcgcagcggtcgggctgaacggggggttcgtgcacacagcccagcttggagcgaacgacctacaccgaactgagatacctacagcgtgagctatgagaaagcgccacgcttcccgaagggagaaaggcggacaggtatccggtaagcggcagggtcggaacaggagagcgcacgagggagcttccagggggaaacgcctggtatctttatagtcctgtcgggtttcgccacctctgacttgagcgtcgatttttgtgatgctcgtcaggggggcggagcctatggaaaaacgccagcaacgcggcctttttacggttcctggccttttgctggccttttgctcacatgttctttcctgcgttatcccctgattctgtggataaccgtattaccgcctttgagtgagctgataccgctcgccgcagccgaacgaccgagcgcagcgagtcagtgagcgaggaagcggaagagcgcccaatacgcaaaccgcctctccccgcgcgttggccgattcattaatgcagctggcacgacaggtttcccgactggaaagcgggcagtgagcgcaacgcaattaatgtgagttagctcactcattaggcaccccaggctttacactttatgcttccggctcgtatgttgtgtggaattgtgagcggataacaatttcacacaggaaacagctatgaccatgattacgccaagctcggcgcgccattgggatggaaccgcgtgacggttctgagtgctaaatcaaacgccgttaacccgatactctctcagattattctctgtttatagtttgttaagattttattcaggttaatgttgttattatcacagtcgaatttttgaacggtatgtatgttgcgatgatcatcagaaagtattttcttattattgctctccttttgatgccatggctggctattcgctagcctcaataagcttcttgcctttctgcaggttttgatggggaagggtatgcttcagttgtgaattaaaaagtcttaaaaaacaataagtagatagagttagctaaaaattaacgcgatatttatcactttttcgcaaagttcgactggacaaaatgcatcacaattgttgtactggtatccgacacagcatttgtgtctatttttcatgtaaaggtaattttgatgtctaagattaaaggtaacgttaagtggtttaatgaatccaaaggattcggtttcattactccggaagatggcagcaaagacgtggttccatcccaatacgcgtcaattcactggccgtcgttttacaacgtcgtgactgggaaaaccctggcgttacccaacttaatcgccttgcagcacatccccctttcgccagctggcgtaatagcgaagaggcccgcaccgatcgcccttcccaacagttgcgcagcctgaatggcgaatggcgcctgatgcggtattttctccttacgcatctgtgcggtatttcacaccgcatatggtgcactctcagtacaatctgctctgatgccgcatagttaagccagccccgacacccgccaacacccgctgacgcgccctgacgggcttgtctgctcccggcatccgcttacagacaagctgtgaccgtctccgggagctgcatgtgtcagaggttttcaccgtcatcaccgaaacgcgcga

SEQ ID NO: 332 - DNA, 3214 bp, synthetic construct
  misc_feature 1..3214: note = Plasmid pSL0230
  source 1..3214: mol_type = other DNA
tcgcgcgtttcggtgatgacggtgaaaacctctgacacatgcagctcccggagacggtcacagcttgtctgtaagcggatgccgggagcagacaagcccgtcagggcgcgtcagcgggtgttggcgggtgtcggggctggcttaactatgcggcatcagagcagattgtactgagagtgcaccatatgcggtgtgaaataccgcacagatgcgtaaggagaaaataccgcatcaggcgccattcgccattcaggctgcgcaactgttgggaagggcgatcggtgcgggcctcttcgctattacgccagctggcgaaagggggatgtgctgcaaggcgattaagttgggtaacgccagggttttcccagtcacgacgttgtaaaacgacggccagtgaattgacgcgtattgggattgaccttagaagatagccgcaaagcgctggttggcagcctgaagtaatctttcctttttaaacaatggcgcagatcgtatctgcgcctttttattctgttttttcctgcattttgttatccatctctaaaaaatactctctgtcggatatatatcgctggttaatcgtatggcgtcacattattcgtctgcaatatagagataatgcgaccagttgacataactggagatataacatggctagcctcaataagcttcttgcctttctgcagaccaaggacccagattatgtgaagttgacgatgcaaaatacggctttgtcgcttccggcacgctgaacccgcaaaaagcgcgtgtcttactgcaactggcgttaacccagactaaagatccaaaacagatccagacgatgttcaatcagtattaaagataatgccccggtcggaaggccggggctatctttggaagacctctcgcacaaccaacactattatcttgctaattatcatcctggttatgataatcgtgggtgtcatgtctctggatcccaatggcgcgccgagcttggcgtaatcatggtcatagctgtttcctgtgtgaaattgttatccgctcacaattccacacaacatacgagccggaagcataaagtgtaaagcctggggtgcctaatgagtgagctaactcacattaattgcgttgcgctcactgcccgctttccagtcgggaaacctgtcgtgccagctgcattaatgaatcggccaacgcgcggggagaggcggtttgcgtattgggcgctcttccgcttcctcgctcactgactcgctgcgctcggtcgttcggctgcggcgagcggtatcagctcactcaaaggcggtaatacggttatccacagaatcaggggataacgcaggaaagaacatgtgagcaaaaggccagcaaaaggccaggaaccgtaaaaaggccgcgttgctggcgtttttccataggctccgcccccctgacgagcatcacaaaaatcgacgctcaagtcagaggtggcgaaacccgacaggactataaagataccaggcgtttccccctggaagctccctcgtgcgctctcctgttccgaccctgccgcttaccggatacctgtccgcctttctcccttcgggaagcgtggcgctttctcatagctcacgctgtaggtatctcagttcggtgtaggtcgttcgctccaagctgggctgtgtgcacgaaccccccgttcagcccgaccgctgcgccttatccggtaactatcgtcttgagtccaacccggtaagacacgacttatcgccactggcagcagccactggtaacaggattagcagagcgaggtatgtaggcggtgctacagagttcttgaagtggtggcctaactacggctacactagaagaacagtatttggtatctgcgctctgctgaagccagttaccttcggaaaaagagttggtagctcttgatccggcaaacaaaccaccgctggtagcggtggtttttttgtttgcaagcagcagattacgcgcagaaaaaaaggatctcaagaagatcctttgatcttttctacggggtctgacgctcagtggaacgaaaactcacgttaagggattttggtcatgagattatcaaaaaggatcttcacctagatccttttaaattaaaaatgaagttttaaatcaatctaaagtatatatgagtaaacttggtctgacagttaccaatgcttaatcagtgaggcacctatctcagcgatctgtctatttcgttcatccatagttgcctgactccccgtcgtgtagataactacgatacgggagggcttaccatctggccccagtgctgcaatgataccgcgagacccacgctcaccggctccagatttatcagcaataaaccagccagccggaagggccgagcgcagaagtggtcctgcaactttatccgcctccatccagtctattaattgttgccgggaagctagagtaagtagttcgccagttaatagtttgcgcaacgttgttgccattgctacaggcatcgtggtgtcacgctcgtcgtttggtatggcttcattcagctccggttcccaacgatcaaggcgagttacatgatcccccatgttgtgcaaaaaagcggttagctccttcggtcctccgatcgttgtcagaagtaagttggccgcagtgttatcactcatggttatggcagcactgcataattctcttactgtcatgccatccgtaagatgcttttctgtgactggtgagtactcaaccaagtcattctgagaatagtgtatgcggcgaccgagttgctcttgcccggcgtcaatacgggataataccgcgccacatagcagaactttaaaagtgctcatcattggaaaacgttcttcggggcgaaaactctcaaggatcttaccgctgttgagatccagttcgatgtaacccactcgtgcacccaactgatcttcagcatcttttactttcaccagcgtttctgggtgagcaaaaacaggaaggcaaaatgccgcaaaaaagggaataagggcgacacggaaatgttgaatactcatactcttcctttttcaatattattgaagcatttatcagggttattgtctcatgagcggatacatatttgaatgtatttagaaaaataaacaaataggggttccgcgcacatttccccgaaaagtgccacctgacgtctaagaaaccattattatcatgacattaacctataaaaataggcgtatcacgaggccctttcgtc

SEQ ID NO: 333 - DNA, 3141 bp, synthetic construct
  misc_feature 1..3141: note = Plasmid pSL0196
  source 1..3141: mol_type = other DNA
tcgcgcgtttcggtgatgacggtgaaaacctctgacacatgcagctcccggagacggtcacagcttgtctgtaagcggatgccgggagcagacaagcccgtcagggcgcgtcagcgggtgttggcgggtgtcggggctggcttaactatgcggcatcagagcagattgtactgagagtgcaccatatgcggtgtgaaataccgcacagatgcgtaaggagaaaataccgcatcaggcgccattcgccattcaggctgcgcaactgttgggaagggcgatcggtgcgggcctcttcgctattacgccagctggcgaaagggggatgtgctgcaaggcgattaagttgggtaacgccagggttttcccagtcacgacgttgtaaaacgacggccagtgaattgacgcgtattgggatacacttgctttaagatttgtaatggctagattgaaaacagttaaaagtattttcgtaaatatttttctctttctggataatgggctatttcaacccacagcagtgcaacatctgtcagtacttctggtgcctttattttatgggggcagctgtcagatgtgcgattaaaaaaagtggagtttcatcatgtttaatgaagtccatagtagctagcctcaataagcttcttgcctttctgcagaccaaggacccagattatgtttcatgggcaaacgataatctcaggcggtaaggccatgaaacgctatctgacctggattgtagcagcagagttactgttcgctaccggaaacctgcatgccaatgaagttgaagtcgaggttcccggattgttaaccgaccagaccgtctcttcgataggacatgaattctatcgtgcattcagcgacaaatgggaaagcgaatacaccatcccaatggcgcgccgagcttggcgtaatcatggtcatagctgtttcctgtgtgaaattgttatccgctcacaattccacacaacatacgagccggaagcataaagtgtaaagcctggggtgcctaatgagtgagctaactcacattaattgcgttgcgctcactgcccgctttccagtcgggaaacctgtcgtgccagctgcattaatgaatcggccaacgcgcggggagaggcggtttgcgtattgggcgctcttccgcttcctcgctcactgactcgctgcgctcggtcgttcggctgcggcgagcggtatcagctcactcaaaggcggtaatacggttatccacagaatcaggggataacgcaggaaagaacatgtgagcaaaaggccagcaaaaggccaggaaccgtaaaaaggccgcgttgctggcgtttttccataggctccgcccccctgacgagcatcacaaaaatcgacgctcaagtcagaggtggcgaaacccgacaggactataaagataccaggcgtttccccctggaagctccctcgtgcgctctcctgttccgaccctgccgcttaccggatacctgtccgcctttctcccttcgggaagcgtggcgctttctcatagctcacgctgtaggtatctcagttcggtgtaggtcgttcgctccaagctgggctgtgtgcacgaaccccccgttcagcccgaccgctgcgccttatccggtaactatcgtcttgagtccaacccggtaagacacgacttatcgccactggcagcagccactggtaacaggattagcagagcgaggtatgtaggcggtgctacagagttcttgaagtggtggcctaactacggctacactagaagaacagtatttggtatctgcgctctgctgaagccagttaccttcggaaaaagagttggtagctcttgatccggcaaacaaaccaccgctggtagcggtggtttttttgtttgcaagcagcagattacgcgcagaaaaaaaggatctcaagaagatcctttgatcttttctacggggtctgacgctcagtggaacgaaaactcacgttaagggattttggtcatgagattatcaaaaaggatcttcacctagatccttttaaattaaaaatgaagttttaaatcaatctaaagtatatatgagtaaacttggtctgacagttaccaatgcttaatcagtgaggcacctatctcagcgatctgtctatttcgttcatccatagttgcctgactccccgtcgtgtagataactacgatacgggagggcttaccatctggccccagtgctgcaatgataccgcgagacccacgctcaccggctccagatttatcagcaataaaccagccagccggaagggccgagcgcagaagtggtcctgcaactttatccgcctccatccagtctattaattgttgccgggaagctagagtaagtagttcgccagttaatagtttgcgcaacgttgttgccattgctacaggcatcgtggtgtcacgctcgtcgtttggtatggcttcattcagctccggttcccaacgatcaaggcgagttacatgatcccccatgttgtgcaaaaaagcggttagctccttcggtcctccgatcgttgtcagaagtaagttggccgcagtgttatcactcatggttatggcagcactgcataattctcttactgtcatgccatccgtaagatgcttttctgtgactggtgagtactcaaccaagtcattctgagaatagtgtatgcggcgaccgagttgctcttgcccggcgtcaatacgggataataccgcgccacatagcagaactttaaaagtgctcatcattggaaaacgttcttcggggcgaaaactctcaaggatcttaccgctgttgagatccagttcgatgtaacccactcgtgcacccaactgatcttcagcatcttttactttcaccagcgtttctgggtgagcaaaaacaggaaggcaaaatgccgcaaaaaagggaataagggcgacacggaaatgttgaatactcatactcttcctttttcaatattattgaagcatttatcagggttattgtctcatgagcggatacatatttgaatgtatttagaaaaataaacaaataggggttccgcgcacatttccccgaaaagtgccacctgacgtctaagaaaccattattatcatgacattaacctataaaaataggcgtatcacgaggccctttcgtc

SEQ ID NO: 334 - DNA, 1217 bp, Salmonella typhimurium
  misc_feature 1..1217: note = ansB (L-asparaginase II)
  source 1..1217: mol_type = genomic DNA
tggcgcagatcgtatctgcgcctttttattctgttttttcctgcattttgttatccatctctaaaaaatactctctgtcggatatatatcgctggttaatcgtatggcgtcacattattcgtctgcaatatagagataatgcgaccagttgacataactggagatataacatggagtttttcaggaaaacggcattagctgctctggtaatgggtttcagcggcgcagcgttcgctttaccgaatatcaccatcttagcgaccggcggaacgatcgctggcggtggtgattcagcaacaaaatcaaattatacggcaggtaaagtcggcgtcgaaaatctggtggatgccgttcctcaattgaaggacattgcggtagtgaaaggcgagcaggtcgttaacattggctcgcaggatatgaacgatgaagtctggctcacgctggcgaaaaaaatcaataccgagtgcgacagcaccgacggtttcgtgatcacccacggtactgatacgatggaagagaccgcttatttcctcgatctgaccgtgaaatgcaataaaccggtggtactggtcggcgcgatgcgtccttccacgtcaatgagcgcagatggcccgttcaacctctataatgcggtagtaacagcggctgataaacagtctgccaaccgcggcgtgctggtggtaatgaatgataccgtcatggacggacgcgacgtcactaagaccaatacgactgacgtggcgacgtttaaagcggttaactacggcccgctgggttatatccacaacggtaaaattgactaccagcgtacgccagagcgtaaacataccacctccaccccgttcgacgtgtcgaagctgaccgcgttgccgaaagtcggtatcgtttataactatgcgaatgcgtccgatctgccggcaaaagcgctggtagacgcgggttatgacgggatcgtgagcgcaggagtgggtaacggcaacctgtataaaacggtctttgataccctggcgaccgccgcgcacaacggtacggtagtggtgcgttcttcacgagtgccgactggcgcaaccacgcaggatgcggaagttgacgatgcaaaatacggctttgtcgcttccggcacgctgaacccgcaaaaagcgcgtgtcttactgcaactggcgttaacccagactaaagatccaaaacagatccagacgatgttcaatcagtattaa

SEQ ID NO: 335 - DNA, 664 bp, Salmonella typhimurium
  misc_feature 1..664: note = csgD
  source 1..664: mol_type = genomic DNA
gtggagtttcatcatgtttaatgaagtccatagtagtcatggtcacacactattgttgatcacaaagccatctctgcaagctacggcattattgcaacatttaaagcaatcgctggccataaccggaaaactgcataatattcaacgttctctggaagatatctcggccggttgcattgttttaatggatatgatggaagcggataagaagcttatccactattggcaggataatttaagccgcaaaaacaataatataaaaacattattgttaaatacccctgacgattatccctaccgtgaaattgaaaactggcctcatattaacggcgtgttttacgctactgaagaccaggaacacgtggtcagcggattacagggtattctgcgtggcgaatgctatttttcacaaaaattagccagttacctgattacgcactcaggaaattaccgctacaacagcaccgagtccgcattactcactcatcgcgaaaaagagatcctcaataagttacgtattggtgcctctaataatgaaatcgcgaggtcgctatttatcagcgagaatacggttaagacacatctttataatcttttcaaaaagatagctgtcaaaaatcgcacccaggcagtttcatgggcaaacgataatctcaggcggtaa

SEQ ID NO: 336 - DNA, 558 bp, Salmonella typhimurium
  misc_feature 1..558: note = rck (resistance to complement killing)
  source 1..558: mol_type = genomic DNA
atgaaaaaaatcgttctgtcctcactgctgctgtccgcagccgggctggctgccgtaccggtggcacaggctgacacccattccgtgtcggtgggatatgcccagagccggatagagcattttaaggatatccgtggggtgaacctgaaataccgctatgaggctcagacgccgctgggactgatggcgtcgttcagttggcagtcaggtaagcgcggagagtccggtggcattcctggcggaatgagctggcgtgatgatgtgaaggcgacgtactggtcgctgatggcgggtccggctgtccgtgtgaacgagctggtatctctgtatgcactggccggtgccggtaccggcagggctgaagtgaaagagcgtatcagcatgccgggatacaacgggcggttcacgggttcggagcgcagaacggggtttgcctggggagccggcgtacagtttaatccggtggaaaatgtggtcatcgatctgggctatgagggaagtaaagttggcgcagcgaaactgaacggcgttaacgttggtgtcggttaccggttctga

SEQ ID NO: 337 - DNA, 4369 bp, Salmonella typhimurium
  misc_feature 1..4369: note = pagP
  source 1..4369: mol_type = genomic DNA
gaattccagcacggcggccagcagcatacagatcaccagaatggtaataatgtgcaactgcggcccccatttaccgtcaaaaatcagtacgccgataatgggcgtgaacggcaaaagggcataaaacgccggggccgtggtggtaatctccgccacgtccagcatctcatgtgaaatgttctcttttttatccagatagcgttgccagaaaaagtgcgcaatcgccataccgataatggcggcgatggaaattggcagcgtagttttgaacgcgaaatcgattaacggcatctccgccgcttttgcggctaaaaccacatcgccagacgttggcgagaggatgatggcggccggagaggcgcaaatagccgccgccgcgccgcggctaatgccgacgttgaccatcaccgggaagagagtagccatgagcagtacgccaagccccgtcgcggaagagacggccagcgacatcaggcaggcgacaaaataggcggcaatcatcaacaggtagggcgagtttatgtactgtaaaggtttcgacgccagcttcacgaccatatcattcgcgccgatatgcgtcatataggcggcaaagccgcacagcatcatgatcatcatgccaagatcgccgccgcgactcataagcaaaattttgatgtattcaacaatatctgttgcggtatagccggtactggtttcgctggcaggtaataccttatgccccatcagcgcgctgataataagcagagccagaccgccgacaaataaaacgccagtggcggaatatcccttaatgatgtagcgcgctacacccacaataacgacgattccgataaggacctctataactgttagcattgtttcccctgtcttatcgacacccagagtaaaaataagaaccacaaaagtggtataaaaatgtaccgaataaaggatggcgccttactgattaaaatcacggcgcggttattttttcatgtcattgctaaagatgaaatatacttatacgaattttctgtagcactataagtattaatttattgttattttattgttttatttgttgtgctttgttttgtgttttttgtgaaagcttattaaggagcgcgtgacggttctgagtgctaaatcaaacgccgttaacccgatactctctcagattattctctgtttatagtttgttaagattttattcaggttaatgttgttattatcacagtcgaatttttgaacggtatgtatgttgcgatgatcatcagaaagtattttcttattattgctctccttttgatgccatggctggctattccttcagtctctgcggcggataaaggggggtttaacacgtttaccgataacgtcgcagaaacgtggcgacagcctgagcattatgatttgtatgtccccgccattacctggcatgcgcgctttgcctacgataaagagaaaacggatcgctataacgagcggccgtggggcgttggttttggtcagtcccgctgggacgacaaaggcaactggcatggcctctatatgatggcctttaaagattcatttaacaaatgggaacccataggcggttatggctgggaaaaaacctggcgaccgctggaagacgataattttcgccttggactgggctttaccgcaggcgttaccgcgcgcgacaactggaattatattcccatccctgtgctgttgcctttagcgtcgataggctatggtcccgctacctttcagatgacctacattccgggttcgtataacaacggaaacgtctatttcgcctggatgcgtttccagttttgatggggaagggtatgcttcagttgtgaattaaaaagtcttaaaaaacaataagtagatagagttagctaaaaattaacgcgatatttatcactttttcgcaaagttcgactggacaaaatgcatcacaattgttgtactggtatccgacacagcatttgtgtctatttttcatgtaaaggtaattttgatgtctaagattaaaggtaacgttaagtggtttaatgaatccaaaggattcggtttcattactccggaagatggcagcaaagacgtgtttgtacacttctctgcaatccagaccaatggttttaaaactctggctgaaggtcagcgcgtagagttcgaaatcactaacggtgccaaaggcccttccgctgcaaacgtaactgctctgtaagcatacgtccgacagcaagatttcaaaacccgccctttcggcgggttttttttgcgcttaacgcgccgctgcggcggaaaatagccagaatgccagcgccgtcatggcaaacgaacctaacaggttaatcagcacattcagcagcgcccagccaaagcgcccctcttgcagcaagaataccacttcggcagaaaaagtagaaaaggtcgtcaggccgccgcaaaagccggttgtgatgagcactttccacatcggatcgatatgtgtcatgcggttaaaccaggcgaaccccatgccgataataaacgcgccaagcaaatttgctgttagcgtaccgatgggaatcgcctgatgaagcggattaaaacgcatactgagcatccaccgggctacgctccccgttccaccgccgataaaaactgctaaaagaagctgtaacactgccgaatcctttatttaattgctatacaagaggagtgtaacgccgaacacgcataattggcgagtcctgacagaggtgtgggaggggatatgttcgttgcagccgggcagtttgtggtgagttctgtatgggaagagaatgcgcaagtttgcgtttcgttaatggctcaggcggcgggccgcggcgtatcgcttctggtgttgcctgaggggatattagcgcgagatgacatcgaccttgacctgccgattcgcgccgcgcagccgctggatggcgcgtttatgacgcggcttctggaagaaagcgctcataataatatgacgacgatattcactatccttgtcccgtcaacgcctggacgggcggttaatatgctggtggcgctacgggcgggtcacattgtcgcgcgttacgcgaagctgcatctctatgatgcgttttcgatgcaagaatcccaaagtattgatgccggaaccgttatcgcgcctgtgctggacgtggagggggttaaggtggggcttatgacctgttatgacctgcgctttccggacatggcgctagcgctggctttacagggggctgacgtattggcgctgccgacgggctgggttcgcggcccgttgaaagagcagcagtggtcgacgctgctggcggcgagagcgctggataccaccagctatatgattgcggccggggagtgtggtaatcgtaatattggtcaaagtcgtattatcgatccgttgggggtaacgatagccgcggcagccgatcgtccggcgctgatcgtcgcggaaatattcagagaacgaatagaccaggtgcgggagcaacttcctcttttgcagcaacgacgatttgcgccaccgcaattattatgatgtttttttacgcaaagcttgattcaccttgttacagattgctattgtgtgcgcgcgtcgaaagaccgttaatattctcaggttaatccggcgcgttacgcagcctgtttttagtgaagaaggtatctatgggtgagattagtattaccaaactgctggtggttgccgcactggttgttctgctgtttggtaccaagaagttacgtacgctgggcggagacctgggcacggcgattaaaggattcaagaaagcaatgaacgatgaagacgcgggcgttaagaaagacgtcgacggtagcgttcaggctgaaaaactctcgcacaaagagtaattgcgcgatgcgcttgctccgcagagtaaaaaaaccggcgagttgccggttttttttgcctgaaatgtaagcgtctattacacgatcatttcacttccatgcctttggcctggagatcagcatggtacgaagaacgtacaaaggggccacaggcggcatgggtaaagcccatcgccagggcttccgctttcatctcgtcaaactcttccgggctgacataacgctgtaccggcaggtgatggcggcttggctgtagatactgaccaagcgtcagcatggtaacgccgtgacggcgtaagtcgcgcataacctcaatgatttccgcattggtttcgcctaagcccaccatcagacccgattttgtcggaatttccgggtgcgcttctttgaagcgttccagtaatttcagcgaccagttgtaatcggcgcccggacgaacctggcggtaaatacgcggcacgttttccaggttgtggttaaacacatccggcggcgtcgcgttaaggatatc

SEQ ID NO: 338 - DNA, 1500 bp, Salmonella typhimurium
  misc_feature 1..1500: note = fliC
  source 1..1500: mol_type = genomic DNA
aaggaaaagatcatggcacaagtcattaatacaaacagcctgtcgctgttgacccagaataacctgaacaaatcccagtccgctctgggcaccgctatcgagcgtctgtcttccggtctgcgtatcaacagcgcgaaagacgatgcggcaggtcaggcgattgctaaccgttttaccgcgaacatcaaaggtctgactcaggcttcccgtaacgctaacgacggtatctccattgcgcagaccactgaaggcgcgctgaacgaaatcaacaacaacctgcagcgtgtgcgtgaactggcggttcagtctgctaacagcaccaactcccagtctgacctcgactccatccaggctgaaatcacccagcgcctgaacgaaatcgaccgtgtatccggccagactcagttcaacggcgtgaaagtcctggcgcaggacaacaccctgaccatccaggttggtgccaacgacggtgaaactatcgatatcgatctgaagcagatcaactctcagaccctgggtctggatacgctgaatgtgcaacaaaaatataaggtcagcgatacggctgcaactgttacaggatatgccgatactacgattgctttagacaatagtacttttaaagcctcggctactggtcttggtggtactgaccagaaaattgatggcgatttaaaatttgatgatacgactggaaaatattacgccaaagttaccgttacggggggaactggtaaagatggctattatgaagtttccgttgataagacgaacggtgaggtgactcttgctggcggtgcgacttccccgcttacaggtggactacctgcgacagcaactgaggatgtgaaaaatgtacaagttgcaaatgctgatttgacagaggctaaagccgcattgacagcagcaggtgttaccggcacagcatctgttgttaagatgtcttatactgataataacggtaaaactattgatggtggtttagcagttaaggtaggcgatgattactattctgcaactcaaaataaagatggttccataagtattaatactacgaaatacactgcagatgacggtacatccaaaactgcactaaacaaactgggtggcgcagacggcaaaaccgaagttgtttctattggtggtaaaacttacgctgcaagtaaagccgaaggtcacaactttaaagcacagcctgatctggcggaagcggctgctacaaccaccgaaaacccgctgcagaaaattgatgctgctttggcacaggttgacacgttacgttctgacctgggtgcggtacagaaccgtttcaactccgctattaccaacctgggcaacaccgtaaacaacctgacttctgcccgtagccgtatcgaagattccgactacgcgaccgaagtttccaacatgtctcgcgcgcagattctgcagcaggccggtacctccgttctggcgcaggcgaaccaggttccgcaaaacgtcctctctttactgcgttaa

SEQ ID NO: 339 - DNA, 1528 bp, Salmonella typhimurium
  misc_feature 1..1528: note = fljB
  source 1..1528: mol_type = genomic DNA
aaattttatggcacaagtaatcaacactaacagtctgtcgctgctgacccagaataacctgaacaaatcccagtccgcactgggcaccgctatcgagcgtctgtcttctggtctgcgtatcaacagcgcgaaagacgatgcggcaggtcaggcgattgctaaccgtttcaccgcgaacatcaaaggtctgactcaggcttcccgtaacgctaacgacggtatctccattgcgcagaccactgaaggcgcgctgaacgaaatcaacaacaacctgcagcgtgtgcgtgaactggcggttcagtctgctaacagcaccaactcccagtctgacctcgactccatccaggctgaaatcacccagcgcctgaacgaaatcgaccgtgtatccggccagactcagttcaacggcgtgaaagtcctggcgcaggacaacaccctgaccatccaggttggcgccaacgacggtgaaactatcgatatcgatctgaagcagatcaactctcagaccctgggtctggactcactgaacgtgcagaaagcgtatgatgtgaaagatacagcagtaacaacgaaagcttatgccaataatggtactacactggatgtatcgggtcttgatgatgcagctattaaagcggctacgggtggtacgaatggtacggcttctgtaaccggtggtgcggttaaatttgacgcagataataacaagtactttgttactattggtggctttactggtgctgatgccgccaaaaatggcgattatgaagttaacgttgctactgacggtacagtaacccttgcggctggcgcaactaaaaccacaatgcctgctggtgcgacaactaaaacagaagtacaggagttaaaagatacaccggcagttgtttcagcagatgctaaaaatgccttaattgctggcggcgttgacgctaccgatgctaatggcgctgagttggtcaaaatgtcttataccgataaaaatggtaagacaattgaaggcggttatgcgcttaaagctggcgataagtattacgccgcagattacgatgaagcgacaggagcaattaaagctaaaactacaagttatactgctgctgacggcactaccaaaacagcggctaaccaactgggtggcgtagacggtaaaaccgaagtcgttactatcgacggtaaaacctacaatgccagcaaagccgctggtcatgatttcaaagcacaaccagagctggcggaagcagccgctaaaaccaccgaaaacccgctgcagaaaattgatgccgcgctggcgcaggtggatgcgctgcgctctgatctgggtgcggtacaaaaccgtttcaactctgctatcaccaacctgggcaataccgtaaacaatctgtctgaagcgcgtagccgtatcgaagattccgactacgcgaccgaagtttccaacatgtctcgcgcgcagattctgcagcaggccggtacttccgttctggcgcaggctaaccaggtcccgcagaacgtgctgtctctgttacgttaa

SEQ ID NO: 340 - DNA, 537 bp, Yersinia enterocolitica
  misc_feature 1..537: note = ail (attachment invasion locus)
  source 1..537: mol_type = genomic DNA
atgaaaaagacattactagctagttctctaatagcctgtttatcaattgcgtctgttaatgtgtacgctgcgagtgaaagtagtatttctattggttatgcgcaaagccatgtaaaagaaaatggggatacattggataatgaccctaaaggttttaacctgaagtaccgttatgaactcgatgataactggggagtaataggttcgtttgcttatactcatcagggatatgatttcttctatggcagtaataagtttggtcatggtgatgttgattactattcagtaacaatggggccatctttccgcatcaacgaatatgttagcctttatggattactgggggccgctcatggaaaggttaaggcatctgtatttgatgaatcaatcagtgcaagtaagacgtcaatggcatacggggcaggggtgcaattcaacccacttccaaattttgtcattgacgcttcatatgaatactccaaactcgatagcacaaaagttggcacctggatgcttggtgcagggtatcgattctaa

SEQ ID NO: 341 - DNA, 1286 bp, Salmonella typhimurium
  misc_feature 1..1286: note = pgtE (outer membrane serine protease)
  source 1..1286: mol_type = genomic DNA
tgattatagattgcttattattcacctgagcatcaaattctatttcttaacttcaatataaggtaaaaatgcgtcaagttctctggcgtaataaatgtactcttgtccgacgatttgacaagatgaaaacttcatcacctctccagattacatctgaatatgaggacaagagaaatgaaaaaacatgctattgcagtaatgatgatcgccgtattttctgagtcggtttatgcggagtctgccttatttattccggacgtctctcctgatagcgtcacgacatccctttccgtgggtgtgttaaatggtaaatccagggagctggtttatgataccgacaccgggcggaagctgagtcaactggattggaaaataaaaaatgtcgccacgttgcagggggatttatcatgggaaccctattcgttcatgacgctggacgcccgcggctggacgtctttggcgtcgggatcgggtcatatggttgaccatgactggatgagcagtgagcagccaggctggaccgatcgttcaattcatccggacaccagcgtcaactatgctaatgaatacgatttgaacgtgaaaggttggttattgcagggcgataactacaaggcgggcgtaacagcgggctatcaggaaacccgttttagctggacggcaagaggcgggtcttatatttatgataatggtcgatatattggtaattttcctcatggcgtgcgcggcataggttatagccagcgtttcgaaatgccctatatcgggctggcgggtgattatcgtattaatgactttgagtgtaatgtactgtttaaatacagcgactgggtaaatgcgcatgataatgacgaacactacatgcgcaaacttaccttccgtgaaaaaacggaaaattcacgatattatggcgcttctattgacgccggatattatattaccagtaatgcaaaaatctttgctgagtttgcttacagtaaatatgaagaaggtaagggcggtacgcaaatcatagataaaaccagcggtgatacggcgtattttggtggcgatgccgcaggtatagctaataataactatacggttaccgcggggttgcagtatcgcttctagaccacatcgggatgtcatcggtcataaccggccgatgacgactttttgctgaacgtatggcatgtccggtgatattgcataggggcaataaaagcaacatgaaagggaaaccgctcgaaaggttatgcagcaagaagagaatgtcctgggtatcaatggtgtcccctgcagta

SEQ ID NO: 342 - protein, 254 aa, Homo sapiens
  REGION 1..254: note = 4-1BBL
MEYASDASLDPEAPWPPAPRARACRVLPWALVAGLLLLLLLAAACAVFLACPWAVSGARASPGSAASPRLREGPELSPDDPAGLLDLRQGMFAQLVAQNVLLIDGPLSWYSDPGLAGVSLTGGLSYKEDTKELVVAKAGVYYVFFQLELRRVVAGEGSGSVSLALHLQPLRSAAGAAALALTVDLPPASSEARNSAFGFQGRLLHLSAGQRLGVHLHTEARARHAWQLTQGATVLGLFRVTPEIPAGLPSPRSE

SEQ ID NO: 343 - DNA, 4899 bp, Homo sapiens
  misc_feature 1..4899: note = 4-1BBL
  source 1..4899: mol_type = genomic DNA
agtctctcgtcatggaatacgcctctgacgcttcactggaccccgaagccccgtggcctcccgcgccccgcgctcgcgcctgccgcgtactgccttgggccctggtcgcggggctgctgctgctgctgctgctcgctgccgcctgcgccgtcttcctcgcctgcccctgggccgtgtccggggctcgcgcctcgcccggctccgcggccagcccgagactccgcgagggtcccgagctttcgcccgacgatcccgccggcctcttggacctgcggcaggtgagacgtgccccgaccctcggtagctggtctcgcgggagacccctaccgcccctctgggactcccttctccctcccgcacccccagggacacctgttctacactcccggccggggagaggagacccaccggggctcccattctccatctagcaccgaggccgggggggcacacctttcatcccgcacccctacgacacctcatctgtaccccaggccgggggcggggaggagaccgcccaacagttctttttggaccccccaagggtctccttcttctagtccggggggcacccctttcatcctgcgcccgctacgagaccctatctgtatcccgggagggggagaggagacccccacaagttctttttggacctccaagggctctccttctccgtcttgcacgggagggcacccctttcattccgcatcccgagaccccatcagcaccccaggccaggaggaggagacccccacagtcctcaacccctcagggatacgtcttctgcaccccgggtcggagaaaggctggcttccctccatgtggcagtgggtgggggcacccctcttcattccgcattcccaaggcaccccatctgcaccctggacgggggaccctccgcggttctccaaccctcgacggcttcctttctctatgtaggacttaggacattgagggcacctctttttaccccgcacccccacaagctctgcatctctggggggaaccttttttccatccccgatccgaggggggcacttcctctttatctgggaccgccaaggagacccccagttcctttgctaactcccaaagagccttatccccaacatctgaggtacccctctccctttcaagacccccaggggaatacccccaagggggctggaaagaagagggatcgcttttccctcctgaattcttggagatctgtccttggggcaggttgagccaccagcttcgtgtgtgtgtgtgtgtgtgtgtgtgtgtgtgttcgtgtttgtgtgggtgtttgtgttcgtgtgtgtgtgttcgtgtgggggtgcgtatgtgtgtgtgttcgtgggtgtgtttgtgttcgtgtgggtgtgtgttcgtgtgggtgtttgtgtttgttcgttcgtgtgggtgtttgtgttcatgtgggtgtgtttggatatttgtgttcgtgtgtgtctgtgtgtgttcgtgtgggtgtttgtgtgtgtttgtgtttgcgttcgtgtgtgtgttcgtgtttgttcgtgtgtctgtgtgttaatgtgggtgttcgtgtgtgtgttcgtttgtgtttgtgttcgtgtgtttgtgtgtttgtgtgtgtgtgtgtgcggtctctgttctttagttgggagggaagggaagcgtaggcttcaggtcggcacagactctggggaccctgacagctgaagtgagtggggacagaacctccattttctaggggaacccccatccactttcctcctttctacttttaacagggcatgtttgcgcagctggtggcccaaaatggtaagtatcctccgccacttccggtccctggccccccaccatccccaccccgggatacgaagaagggggaacctggagagtgaggctctgccgcacactggctttgacccttgaccgctgctgtctctgaaagctgctacttcccctctttgaacgccaccgatccctctttctgacttgctctgactctctggatgccatggcctccccatcagacccccatctgggcccacctgggacccctgccctctcagagctggggcttgacacccccaacccccagcctggttttgtgtctctggcctccttcttttcgaaaccctcttccccgctgcttttcttccctctttcctgccccttccccactctcccagcctctcttccctacctcttcccctcgcccagagcctcctccttactcccattctcttccccatccccaggccctcctcctgtccccttccctccccctagaccctcctccctgccccttccccaaaccctccccagccccatgctctcccagtttccaagacactcctcccagcaccttccctccccgtccagagacttcttccccgctcgagacctcttcccccttcccctcccagagacccccttcccccttcccctctccatctagagatcacttccccctttcccctccccctccagaaaccccttcccccttccctctcccctccagagaccccttccccctccaaagaccccttcccccttccttccccctccagagacccctttccccttccctccccttccagagaccccttccccctccccctccaaagaccccttcctccttcccctccctctccagagaccccttcccccttccctctccctccagagaccccttcccccttccctgccccctccagagtccccttcccctccagaggccccttcccccttccccctccccctccagagacaccttctcccttctccccctccagagaccccttcccccttccctccccctgcctaagactcccctccctgccatcttctctccttggtgcttccttctccctaacccctcccccaccccttcctgctccctttgcctttcttcgaagtcctctcttaccaggtcccctgtccacccctcttaaagttcccttgattccctgatggatccttcctctagaacttcctcctttcctaacagtcttccctctccctcctagctccctgtccacctctcctctcccctttccttccttctctcccttctcctccccccatctccatcctgtccgagatctgctgctccctccaaccccctcaccgccctctccaggagtccccttacccctccccgaggcctcttccagccagactcgcctggccttttgcttttcaccccctcttcctcttcctgcatgtctttccccgcacccgcatcactccttccccacccaacctcttggagttttgccctgtcccgactcttgtccttctccctggattcccttcctctgttctatccccgtctttccctcccctagctctacccctgctcagagtcccgcccccaacaacctcagttctcttcaatcagcacccccccaacgccccccccacccaggctccccgctctgctcccctgtcccgctccctgccccgccattccccgccccccggcccctgacccgttcttttctcccagggctgcgctgacatgttcggtgctcagccacgctcagctgtgctgggacatgctcagctaagctaagtgcatgctttcctcccacagttctgctgatcgatgggcccctgagctggtacagtgacccaggcctggcaggcgtgtccctgacggggggcctgagctacaaagaggacacgaaggagctggtggtggccaaggctggagtctactatgtcttctttcaactagagctgcggcgcgtggtggccggcgagggctcaggctccgtttcacttgcgctgcacctgcagccactgcgctctgctgctggggccgccgccctggctttgaccgtggacctgccacccgcctcctccgaggctcggaactcggccttcggtttccagggccgcttgctgcacctgagtgccggccagcgcctgggcgtccatcttcacactgaggccagggcacgccatgcctggcagcttacccagggcgccacagtcttgggactcttccgggtgacccccgaaatcccagccggactcccttcaccgaggtcggaataacgtccagcctgggtgcagcccacctggacagagtccgaatcctactccatccttcatggagacccctggtgctgggtccctgctgctttctctacctcaaggggcttggcaggggtccctgctgctgacctccccttgaggaccctcctcacccactccttccccaagttggaccttgatatttattctgagcctgagctcagataatatattatatatattatatatatatatatatttctatttaaagaggatcctgagtttgtgaatggacttttttagaggagttgttttgggggggggggggtcttcgacattgccgaggctggtcttgaactcctggacttagacgatcctcctgcctcagcctcccaagcaactgggattcatcctttctattaattcattgtacttatttgcttatttgtgtgtattgagcatctgtaatgtgccagcattgtgcccaggctagggggctatagaaacatctagaaatagactgaaagaaaatctgagttatggtaatacgtgaggaatttaaagactcatccccagcctccacctcctgtgtgatacttgggggctagcttttttctttctttcttttttttgagatggtcttgttctgtcaaccaggctagaatgcagcggtgcaatcatgagtcaatgcagcctccagcctcgacctcccgaggctcaggtgatcctcccatctcagcctctcgagtagctgggaccacagttgtgtgccaccacacttggctaactttttaatttttttgcggagacggtattgctatgttgccaaggttgtttacatgccagtacaatttataataaacactcatttttcctccc

SEQ ID NO: 344 - protein, 309 aa, Mus musculus
  REGION 1..309: note = 4-1BBL
MDQHTLDVEDTADARHPAGTSCPSDAALLRDTGLLADAALLSDTVRPTNAALPTDAAYPAVNVRDREAAWPPALNFCSRHPKLYGLVALVLLLLIAACVPIFTRTEPRPALTITTSPNLGTRENNADQVTPVSHIGCPNTTQQGSPVFAKLLAKNQASLCNTTLNWHSQDGAGSSYLSQGLRYEEDKKELVVDSPGLYYVFLELKLSPTFTNTGHKVQGWVSLVLQAKPQVDDFDNLALTVELFPCSMENKLVDRSWSQLLLLKAGHRLSVGLRAYLHGAQDAYRDWELSYPNTTSFGLFLVKPDNPWE

SEQ ID NO: 345 - DNA, 2472 bp, Mus musculus
  misc_feature 1..2472: note = 4-1BBL
  source 1..2472: mol_type = genomic DNA
gagaaagttccgggagtcgaggggcggagcgcggagcccgggaaccccgcggctgccctccctcccttccctccccggaaaaggcgcctcggtagcctataaagcacgggcactggcgggagacgtgcactgaccgaccgtggtaatggaccagcacacacttgatgtggaggataccgcggatgccagacatccagcaggtacttcgtgcccctcggatgcggcgctcctcagagataccgggctcctcgcggacgctgcgctcctctcagatactgtgcgccccacaaatgccgcgctccccacggatgctgcctaccctgcggttaatgttcgggatcgcgaggccgcgtggccgcctgcactgaacttctgttcccgccacccaaagctctatggcctagtcgctttggttttgctgcttctgatcgccgcctgtgttcctatcttcacccgcaccgagcctcggccagcgctcacaatcaccacctcgcccaacctgggtacccgagagaataatgcagaccaggtcacccctgtttcccacattggctgccccaacactacacaacaggtgaggctcatctcatccctaggggactctttcttaccttctggaagcatcgctgcaccgacagggagagaacagcacttcctccccacccccgccccgccccgccccgccccgcctcgctctgctcctgctactccgcttgaagcaccccctctccatctcgcactcagaggaaatccctttgcgtcttgaccccttgaatgaacctatgaaacctgggggagaactcccgagggtgcaccgcagttcccttcagtcccacttaggccttcagggctctccttctccatccaaagttggacgccccaatgtgtgctgggccgtatgagttcctatctgcttctttaggatgtaaggtaccatctacctttatttttctttcttcccagggctctcctgtgttcgccaagctactggctaaaaaccgtgagtgccccctgatttatttccagcgggtcccgcagggaggttgaacaaggggacctgttcaaccttctagtcatgtccctctccctcacttactcagcctttctcacttgctgtcacagctccaactgtcatccttgggaccccatccaggttttcagagaattgagaattctcacccccagctgactctgggagatctccttttctcttttccttcctctatccctcccatgtagcccaggcttcctccaaattcattatgtagctgaggctggccgccctgctgccaacacctccaatgggctgggataaatgaatgcctttgggcttcaggcaccctattgagcccgagccctagtctctccctgtcaagtcttagttgtcaaattatttgccctcagagatgactctcttcctgcactctccatatcccacctctctcccagttttgttcatccctctcttactcctctgatttctctctcttcttttctcctctcccccttcccctcttgtggcccctttactcagctccttccaggagtccatgtgcatctccgctcttaacactctagaccctcgcccctttgcctcgttcttattccacaaccactttcttaaattgtatcccttctgggtggcccctccctccttttcttctgttttgtctcctctctttcctccccattcccatggtttcccccctcccccacaccccgcaaccctcagcaactcagtgttctttttctagaagcatcgttgtgcaatacaactctgaactggcacagccaagatggagctgggagctcatacctatctcaaggtctgaggtacgaagaagacaaaaaggagttggtggtagacagtcccgggctctactacgtatttttggaactgaagctcagtccaacattcacaaacacaggccacaaggtgcagggctgggtctctcttgttttgcaagcaaagcctcaggtagatgactttgacaacttggccctgacagtggaactgttcccttgctccatggagaacaagttagtggaccgttcctggagtcaactgttgctcctgaaggctggccaccgcctcagtgtgggtctgagggcttatctgcatggagcccaggatgcatacagagactgggagctgtcttatcccaacaccaccagctttggactctttcttgtgaaacccgacaacccatgggaatgagaactatccttcttgtgactcctagttgctaagtcctcaagctgctatgttttatggggtctgagcaggggtcccttccatgactttctcttgtctttaactggacttggtatttattctgagcatagctcagacaagactttatataattcactagatagcattagtaaactgctgggcagctgctagataaaaaaaaatttctaaatcaaagtttatatttatattaatatataaaaataaatgtgtttgta

SEQ ID NO: 346 - DNA, 589 bp, synthetic construct
  misc_feature 1..589: note = Woodchuck Hepatitis Virus PosttranscriptionalRegulatory Element (WPRE)
  source 1..589: mol_type = other DNA
aatcaacctctggattacaaaatttgtgaaagattgactggtattcttaactatgttgctccttttacgctatgtggatacgctgctttaatgcctttgtatcatgctattgcttcccgtatggctttcattttctcctccttgtataaatcctggttgctgtctctttatgaggagttgtggcccgttgtcaggcaacgtggcgtggtgtgcactgtgtttgctgacgcaacccccactggttggggcattgccaccacctgtcagctcctttccgggactttcgctttccccctccctattgccacggcggaactcatcgccgcctgccttgcccgctgctggacaggggctcggctgttgggcactgacaattccgtggtgttgtcggggaagctgacgtcctttccatggctgctcgcctgtgttgccacctggattctgcgcgggacgtccttctgctacgtcccttcggccctcaatccagcggaccttccttcccgcggcctgctgccggctctgcggcctcttccgcgtcttcgccttcgccctcagacgagtcggatctccctttgggccgcctccccgc

SEQ ID NO: 347 - DNA, 753 bp, synthetic construct
  misc_feature 1..753: note = Hepatitis B Virus Posttranscriptional RegulatoryElement (HPRE)
  source 1..753: mol_type = other DNA
atgcatgtattcaatctaagcaggctttcactttctcgccaacttacaaggcctttctgtgtaaacaatacctgaacctttaccccgttgcccggcaacggccacctctgtgccaagtgtttgctgacgcaacccccactggctggggcttggtcatgggccatcagcgcatgcgtggaaccttttcggctcctctgccgatccatactgcggaactcctagccgcttgttttgctcgcagcaggtctggagcaaacattatcgggactgataactctgttgtcctatcccgcaaatatacatcgtttccatggctgctaggctgtgctgccaactggatcctgcgcgggacgtcctttgtttacgtcccgtcggcgctgaatcctgcggacgacccttctcggggtcgcttgggactctctcgtccccttctccgtctgccgttccgaccgaccacggggcgcacctctctttacgcggactccccgtctgtgccttctcatctgccggaccgtgtgcacttcgcttcacctctgcacgtcgcatggagaccaccgtgaacgcccaccaaatattgcccaaggtcttacataagaggactcttggactctcagcaatgtcaacgaccgaccttgaggcatacttcaaagactgtttgtttaaagactgggaggagttgggggaggagattaggttaaaggtctttgtactaggaggctgtaggcataaattggtctgcgcaccagcaccatg

SEQ ID NO: 348 - protein, 398 aa, Danio rerio
  REGION 1..398: note = WT Zebrafish STING (zfSTING)
MSVMGEDALVPRARSRLPVMCAAGLGFLTLAVAWLLDSDKFSERAGIIAFGLMLERFIYCICLLAEELLFHSRQRYHGRMSEIFRACFRGSGILGMCAIFLMLMLGGVSFSVKQWSHFNLMCAGYMLLNSLGVLGPAPVEISEICEAKKMNVAHGLAWSFYIGYLKFLLPALEVNVREYSRRERLSSPRLHILLPLNARVPSKPEEEDTNVVFHENLPDLKLDRAGVRKRSYTNSVYKITHNNETFSCILEYATPLLTLYQMSQESSAGFGERERKQQVLLFYRTLSQILDNSLECRNRYRLILLNDEHTGDPHYLSRELFQNLKQQDGEIFMDPTNEVHPVPEEGPVGNCNGALQATFHEEPMSDEPTLMFSRPQSLRSEPVETTDYFNPSSAMKQN

SEQ ID NO: 349 - protein, 381 aa, Sarcophilus harrisii
  REGION 1..381: note = WT Tasmanian devil STING (tazSTING)
MPRSHLHPSIPQPRGWGAQKAACVLLSLCMAAVYILGESAAFTLQWLLFYFTTVQVGLLLKGAYCLAEELYHIQSRHQGSYWQAIQACIHYPFQRISLLLLSGYFYVTLSNKPNPSLTWTFALLGLSHALSFILGLQNLTSAEISEVCEKRHLNVAHGLAWSYYIGYLKLILPGLQTRIQIYNQFNKDVLRSPEGHRLHILIPLDCSVPDNLSQADPNIQFLQELPQHKLDRAGIKGRIYTNSIYKISEDGQPAEVCVLEFATPLQTLFAMSQDARAGFSREDRLEQAKLFCRTLEDILEDAPEARDCCRLVVYQEPEDKAVSNFSLSKEILRHLRQERQEEFAIGPKRAMTVTTSSTLSQEPQLLISGMEQPLSLRTDGF

SEQ ID NO: 350 - protein, 381 aa, synthetic construct
  REGION 1..381: note = Tasmanian devil STING (tazSTING) C206Y
MPRSHLHPSIPQPRGWGAQKAACVLLSLCMAAVYILGESAAFTLQWLLFYFTTVQVGLLLKGAYCLAEELYHIQSRHQGSYWQAIQACIHYPFQRISLLLLSGYFYVTLSNKPNPSLTWTFALLGLSHALSFILGLQNLTSAEISEVCEKRHLNVAHGLAWSYYIGYLKLILPGLQTRIQIYNQFNKDVLRSPEGHRLHILIPLDYSVPDNLSQADPNIQFLQELPQHKLDRAGIKGRIYTNSIYKISEDGQPAEVCVLEFATPLQTLFAMSQDARAGFSREDRLEQAKLFCRTLEDILEDAPEARDCCRLVVYQEPEDKAVSNFSLSKEILRHLRQERQEEFAIGPKRAMTVTTSSTLSQEPQLLISGMEQPLSLRTDGF

SEQ ID NO: 351 - protein, 381 aa, synthetic construct
  REGION 1..381: note = Tasmanian devil STING (tazSTING) R284G
MPRSHLHPSIPQPRGWGAQKAACVLLSLCMAAVYILGESAAFTLQWLLFYFTTVQVGLLLKGAYCLAEELYHIQSRHQGSYWQAIQACIHYPFQRISLLLLSGYFYVTLSNKPNPSLTWTFALLGLSHALSFILGLQNLTSAEISEVCEKRHLNVAHGLAWSYYIGYLKLILPGLQTRIQIYNQFNKDVLRSPEGHRLHILIPLDCSVPDNLSQADPNIQFLQELPQHKLDRAGIKGRIYTNSIYKISEDGQPAEVCVLEFATPLQTLFAMSQDARAGFSREDGLEQAKLFCRTLEDILEDAPEARDCCRLVVYQEPEDKAVSNFSLSKEILRHLRQERQEEFAIGPKRAMTVTTSSTLSQEPQLLISGMEQPLSLRTDGF

SEQ ID NO: 352 - protein, 379 aa, synthetic construct
  REGION 1..379: note = WT human STING-tasmanian devil CTT
MPHSSLHPSIPCPRGHGAQKAALVLLSACLVTLWGLGEPPEHTLRYLVLHLASLQLGLLLNGVCSLAEELRHIHSRYRGSYWRTVRACLGCPLRRGALLLLSIYFYYSLPNAVGPPFTWMLALLGLSQALNILLGLKGLAPAEISAVCEKGNFNVAHGLAWSYYIGYLRLILPELQARIRTYNQHYNNLLRGAVSQRLYILLPLDCGVPDNLSMADPNIRFLDKLPQQTGDRAGIKDRVYSNSIYELLENGQRAGTCVLEYATPLQTLFAMSQYSQAGFSREDRLEQAKLFCRTLEDILADAPESQNNCRLIAYQEPADDSSFSLSQEVLRHLRQERQEEFAIGPKRAMTVTTSSTLSQEPQLLISGMEQPLSLRTDGF

SEQ ID NO: 353 - protein, 379 aa, synthetic construct
  REGION 1..379: note = human STING C206Y-tasmanian devil CTT
MPHSSLHPSIPCPRGHGAQKAALVLLSACLVTLWGLGEPPEHTLRYLVLHLASLQLGLLLNGVCSLAEELRHIHSRYRGSYWRTVRACLGCPLRRGALLLLSIYFYYSLPNAVGPPFTWMLALLGLSQALNILLGLKGLAPAEISAVCEKGNFNVAHGLAWSYYIGYLRLILPELQARIRTYNQHYNNLLRGAVSQRLYILLPLDYGVPDNLSMADPNIRFLDKLPQQTGDRAGIKDRVYSNSIYELLENGQRAGTCVLEYATPLQTLFAMSQYSQAGFSREDRLEQAKLFCRTLEDILADAPESQNNCRLIAYQEPADDSSFSLSQEVLRHLRQERQEEFAIGPKRAMTVTTSSTLSQEPQLLISGMEQPLSLRTDGF

SEQ ID NO: 354 - protein, 379 aa, synthetic construct
  REGION 1..379: note = human STING R284G-tasmanian devil CTT
MPHSSLHPSIPCPRGHGAQKAALVLLSACLVTLWGLGEPPEHTLRYLVLHLASLQLGLLLNGVCSLAEELRHIHSRYRGSYWRTVRACLGCPLRRGALLLLSIYFYYSLPNAVGPPFTWMLALLGLSQALNILLGLKGLAPAEISAVCEKGNFNVAHGLAWSYYIGYLRLILPELQARIRTYNQHYNNLLRGAVSQRLYILLPLDCGVPDNLSMADPNIRFLDKLPQQTGDRAGIKDRVYSNSIYELLENGQRAGTCVLEYATPLQTLFAMSQYSQAGFSREDGLEQAKLFCRTLEDILADAPESQNNCRLIAYQEPADDSSFSLSQEVLRHLRQERQEEFAIGPKRAMTVTTSSTLSQEPQLLISGMEQPLSLRTDGF

SEQ ID NO: 355 - protein, 376 aa, synthetic construct
  REGION 1..376: note = WT human STING delTRAF6 binding motif(Asp-Phe-Ser at C-terminal removed)
MPHSSLHPSIPCPRGHGAQKAALVLLSACLVTLWGLGEPPEHTLRYLVLHLASLQLGLLLNGVCSLAEELRHIHSRYRGSYWRTVRACLGCPLRRGALLLLSIYFYYSLPNAVGPPFTWMLALLGLSQALNILLGLKGLAPAEISAVCEKGNFNVAHGLAWSYYIGYLRLILPELQARIRTYNQHYNNLLRGAVSQRLYILLPLDCGVPDNLSMADPNIRFLDKLPQQTGDRAGIKDRVYSNSIYELLENGQRAGTCVLEYATPLQTLFAMSQYSQAGFSREDRLEQAKLFCRTLEDILADAPESQNNCRLIAYQEPADDSSFSLSQEVLRHLRQEEKEEVTVGSLKTSAVPSTSTMSQEPELLISGMEKPLPLRT

SEQ ID NO: 356 - protein, 377 aa, Felis catus
  REGION 1..377: note = WT cat STING (catSTING)
MPRTGLHPSIPRPRGMGAQKAALVLLAVCLAALWRLGESPDHTLRWLVLHLASLQLGLLFTGVCHLTEELCHLHSRYQGSYWRAMKACLGSPVRSGALLLLSCYFYSTLPSTDLPFTWMLALLGLSQALNILLDLQGLAPAEVSAVCEKKNFNVAHGLAWSYYIGYLRLILPGLPARVLTCNQLHNNILRGTGSHRLHILFPLDCGVPDDMSVADPNIRFLYELPQQSADRAGIKGRVYTNSVYALLENGQQAGICVLEYATPLQTLFAMSQDGRAGFSREDRLEQAKLFCRILEDILADTPECQNNCRLIVYQEPEEGSNFSLSQEILRHLRQEEREVTVGSVGTSMVRNPSVLSQEPNLLISGMEQPLPLRTDVF

SEQ ID NO: 357 - protein, 377 aa, synthetic construct
  REGION 1..377: note = cat STING C205Y
MPRTGLHPSIPRPRGMGAQKAALVLLAVCLAALWRLGESPDHTLRWLVLHLASLQLGLLFTGVCHLTEELCHLHSRYQGSYWRAMKACLGSPVRSGALLLLSCYFYSTLPSTDLPFTWMLALLGLSQALNILLDLQGLAPAEVSAVCEKKNFNVAHGLAWSYYIGYLRLILPGLPARVLTCNQLHNNILRGTGSHRLHILFPLDYGVPDDMSVADPNIRFLYELPQQSADRAGIKGRVYTNSVYALLENGQQAGICVLEYATPLQTLFAMSQDGRAGFSREDRLEQAKLFCRILEDILADTPECQNNCRLIVYQEPEEGSNFSLSQEILRHLRQEEREVTVGSVGTSMVRNPSVLSQEPNLLISGMEQPLPLRTDVF

SEQ ID NO: 358 - protein, 377 aa, synthetic construct
  REGION 1..377: note = cat STING R283G
MPRTGLHPSIPRPRGMGAQKAALVLLAVCLAALWRLGESPDHTLRWLVLHLASLQLGLLFTGVCHLTEELCHLHSRYQGSYWRAMKACLGSPVRSGALLLLSCYFYSTLPSTDLPFTWMLALLGLSQALNILLDLQGLAPAEVSAVCEKKNFNVAHGLAWSYYIGYLRLILPGLPARVLTCNQLHNNILRGTGSHRLHILFPLDCGVPDDMSVADPNIRFLYELPQQSADRAGIKGRVYTNSVYALLENGQQAGICVLEYATPLQTLFAMSQDGRAGFSREDGLEQAKLFCRILEDILADTPECQNNCRLIVYQEPEEGSNFSLSQEILRHLRQEEREVTVGSVGTSMVRNPSVLSQEPNLLISGMEQPLPLRTDVF

SEQ ID NO: 359 - protein, 377 aa, Callithrix jacchus
  REGION 1..377: note = WT Marmoset STING
MPHSSLHPSIPHPRGHGAQEAALVLLSVCLVTLWWLREAPEDILRFLVLHLASLQLGLLLNRLCSLAEELRHVHTRYQGSYWRAVRACLGCPIRLGAQLLLSIYFYCFLPNGRPFTWMLALLGFSQALNILLGLKGLAPAEISAVCEKRNFNVAHGLAWSYYIGYLRLILPGFQARIRTYNQHNNNVLRGPASQRLYILFPLDCGVPDNLSTADPNIRFLDKLPQETIDRAGIKGRVYTNSIYELLENGQRAGACVLEYASPLQTLFAMSQYGQAGFSREDRLEQAKLFCRTLEDILADAPESQNNCRLIVYEEPADGSSFLLSQEVLQHLRQEEEEEVTVGSLKTSEVPSTSTMSQEPELLISGMEKPLPLRSDLF

SEQ ID NO: 360 - protein, 378 aa, Bos taurus
  REGION 1..378: note = WT Cattle/Bovine STING
MPHSSLHPSIPQPRGLRAQKAALVLLSACLVALWGLGEPPDYTLKWLVLHLASQQMGLLIKGICSLAEELCHVHSRYHGSYWRAVRACLCSSMRCGALLLLSCYFYCSLPNMADLPFTWMLALLGLSQALNILLGLQGLAPAEVSAICEKRNFNVAHGLAWSYYIGYLRLILPGLPARIQIYNQFHNNTLQGAGSHRLHILFPLDCGVPDDLNVADPNIRFLHELPQQSADRAGIKGRVYTNSIYELLENGQRAGVCVLEYATPLQTLFAMSQDGRAGFSREDRLEQAKLFCRTLEDILANAPESQNNCRLIVYQEPAEGSSFSLSQEILQHLRQEEREVTMGSTETSVMPGSSVLSQEPELLISGLEKPLPLRSDVF

SEQ ID NO: 361 - protein, 375 aa, Struthio camelus australis
  REGION 1..375: note = WT Ostrich STING
MAHESGTPSNPATPLIPKAREGRAQHAAYVLLALCAAALYLAGEPVVHIARSFTSHFVALQIGALLKGICYLVEEIFHLETRHRGSFRRALSACLHLRWHVTLLLVCGSAYVALLDGDEQPLGLHLGLACLCQLLILALGLHKPSAVEISEMSERSKQNVAHGLAWSYYVGYLKIVLPRLKESMENIGRTNPNMLAHKETWKLHILVPLSCNICDDLEKADSNIQYAMDLPETTLTRAGTKKRVYRNTLYKIKDEDKFRFCVVEYATPLQSLYAMSQDECAAFSREDRIEQAKLFYRTLEEILQSAKECAGTYRLIVYEESGEAETHFLSREILRHLQQQRQEEYTVCDGTLCSTDLSLQISESDLPQPLRSDCL

SEQ ID NO: 362 - protein, 382 aa, Nipponia nippon
  REGION 1..382: note = WT Crested ibis STING
MSQEPQWLSHPTALLIPKARGGRAQHAVYLLLALCAAVLYLAGEPLVPSARSLISHFMALQIGVLLKGTCYLAEEIFHLQSRHHGSFWRALSACFPLRWHGLMLLVCGSAYVALLEDGQPLGLHLGLASLCQLLILALGLHKPSAVEMSEMSERSKQNVAHGLAWSYYVGYLKIVLPRVKKSMEEFSRANPNVLARRETWKLHILVPLSCDVYDDLEKADSNIQYLMDLPETTLTRAGTKKRVYKHSLYTIRDEGNKLWHCAVEYATPLQSLYAMSQDEYAAFSREDRLEQAKLFYRTLEEILKGSKECAGTYRLIVYEESGEAETHSLSRDILWHLRQQCHEEYTVYEGNQPHNPSTTLHSTELNLQISESDLPQPLRSDC

SEQ ID NO: 363 - protein, 380 aa, Latimeria chalumnae
  REGION 1..380: note = WT Coelacanth STING(UniProtKB entry H3A3G4)
FGLQNMSAIIPQPRGNRANQMAYFIITVILMLLWIFRNIMDNVLEVIALHILLLQGAAIMKGICNFAEEVNHVQPRYGGSYWKALEACLNLSKYDVMKIVFAGVLWWHFSSSLFVVWFLHLLVSCLCHLLNNVLGVLKPSPVEVSEIYERNRIGVAHGLAWSYYLGYLKLVLPELEDRIKSYNVSHGNLLKHKETWRLHILLPLSCSIFDNLADVDSNIEFLDNLSELQINRAGIKGRSYKHSLYQVLDEDKRPHYCILEYATPLKSLLEMSKEASAEFTKEDRLEQTKLFYRTLKDILDNSQECRGRFRLVIYDGREDSGKSHFLSKELLRHLNQQQKEEYFMSEQTQPNSSSTSCLSTEPQLMISDTDAPHTLKRQVC

SEQ ID NO: 364 - protein, 405 aa, Latimeria chalumnae
  REGION 1..405: note = WT Coelacanth STING(Isoform X1; NCBI Accession No. XP_005989369.1)
MCFIQVLDITIITQMLQGEYFGLQNMSAIIPQPRGNRANQMAYFIITVILMLLWIFRNIMDNVLEVIALHILLLQGAAIMKGICNFAEEVNHVQPRYGGSYWKALEACLNLSKYDVMKIVFAGVLWWHFSSSLFVVWFLHLLVSCLCHLLNNVLGVLKPSPVEVSEIYERNRIGVAHGLAWSYYLGYLKLVLPELEDRIKSYNVSHGNLLKHKETWRLHILLPLSCSIFDNLADVDSNIEFLDNLSELQINRAGIKGRSYKHSLYQVLDEDKRPHYCILEYATPLKSLLEMSKEASAEFTKEDRLEQTKLFYRTLKDILDNSQECRGRFRLVIYDDCQDVLDGEDSGKSHFLSKELLRHLNQQQKEEYFMSEQTQPNSSSTSCLSTEPQLMISDTDAPHTLKSGF

SEQ ID NO: 365 - protein, 378 aa, Sus scrofa
  REGION 1..378: note = WT Boar STING
MPYSSLHPSIPQPRGLRAQVAALVLLGACLVALWGLGELPEYTLRWLVLHLASQQIGLLVKGLCSLAEELCHVHSRYQSSYWRAARACLGCPIRCGALLLLSCYFYFSIRDKAGLPLPWMLALLGLSQALNILLGLQHLAPAEVSAICEKRNFNVAHGLAWSYYIGYLRLILPGLRARIQAYNQRHKNVLGGIGNHRLHILFPLDCGVPDDLSVADPNIRFLHELPQQSADRAGIKGRVYTNSIYELLENGQPAGVCVLGYATPLQTLFAMSQDGRAGFSREDRLEQAKLFCRTLEDILADAPEAQNNCRLIVYQEPTEGGSFSLSQEILRHLRQEEREVTMGSAETSVVPTSSTLSQEPELLISGMEQPLPLRSDIF

SEQ ID NO: 366 - protein, 380 aa, Rousettus aegyptiacus
  REGION 1..380: note = WT Bat STING
MSHSSLHPSVPRPRGRRARNIAAFVLLIVCLAALWLSGKPSEYTLRCLVLHLASQQLGLLSNRVCYLAEELSHIHSRYQGNYWRAVRACLSCPIRFGVVLLVSFFFYTSLPNIDDLPLTWMLAHLGLSEALNILLGLRGLTPAEVSTVCEQRHFNVAHGLAWSYYIGYLRLILPGLRARIHTYNQLHGNTLQGVGSHRLYILFPLDCGVLDDLSAADPNIRFLRELPRQSSDRAGIKNRVYTNSVYELLEKGKPVGTCVLEYATPLQTLFAMSQDARAGFSQEDRLEQAKLFCRTLADILADDPESQKSCRLIVYQEPTEESDFSLSQAILKHLRQEEKEEVTVGTVGTYEAPGSSTLHQEPELLISGMDQPLPLRTDIF

SEQ ID NO: 367 - protein, 387 aa, Trichechus manatus latirostris
  REGION 1..387: note = WT Manatee STING
MVEMPHSSLHPSIPRHRGHGIQKAAFVLLVACLVALWELGEPPGHTLQWLVCQLASLQLGLLLKVICSLAEELCHVHSRYQSSYWRAVRACMGCPIRRGALLLLSCYFYFCFPNMADLPLTWTLALLGLLQAMNILLSLQGLTPAEISAICEKRNLNVAHGLAWSYYIGYLRLILPGLQDRIRIYNLQHNNMLRGTGSQRLHILFPLDCGVPNDLSVADANIRFLQKLPQQSADCAGIKGRVYTNSVYQLLEHGQPAGICVLEYATPLQTLFAMSQDGRAGFSREDRLEQAKLFCRTLEDILADAPEYQNNCRLIVYQESAEGSSFSLSQEILRHLRQEEREEVTVGSVGTSVVPSPSSPSTSSLSQEPKLLISGMEQPLPLRTDVF

SEQ ID NO: 368 - protein, 378 aa, Callorhinchus milii
  REGION 1..378: note = WT Ghost shark STING
MSDSIPRPRGKVATYVGLILMSGLACLYFMLTPDYHIKFIVQQVAQQLIVSFFALCLLRLCEFVEELGHKQTRYQNSWVRALNASLDWKKYGFCLLISLLFNWVLPYEKHMSYAVPTVGQTISLTCFCVLFLKVFQLDVLSPAQISEISETNKCNVAHGLAWSYYLGYLKIVLPKLEEKINQYHREYGNVLQQKGKKLYILIPFSCKVLDKLEKVDTNIVFYQNLPELLVDRAGIKSRSYKHSIYLIYDQKKQQPHHCILEYATPLRSLFEMTNDSAAAFSKEQRLDQAKLFYRTLKSILNNVPEVTGSYRLIPYDDDLEGAELGPHFVSEEILKHMRQELTEYPVAEPSNANETDCMSSEPHLMISDDPKPLRSYCP

SEQ ID NO: 369 - protein, 378 aa, Mus musculus
  REGION 1..378: note = WT Mouse STING
MPYSNLHPAIPRPRGHRSKYVALIFLVASLMILWVAKDPPNHTLKYLALHLASHELGLLLKNLCCLAEELCHVQSRYQGSYWKAVRACLGCPIHCMAMILLSSYFYFLQNTADIYLSWMFGLLVLYKSLSMLLGLQSLTPAEVSAVCEEKKLNVAHGLAWSYYIGYLRLILPGLQARIRMFNQLHNNMLSGAGSRRLYILFPLDCGVPDNLSVVDPNIRFRDMLPQQNIDRAGIKNRVYSNSVYEILENGQPAGVCILEYATPLQTLFAMSQDAKAGFSREDRLEQAKLFCRTLEEILEDVPESRNNCRLIVYQEPTDGNSFSLSQEVLRHIRQEEKEEVTMNAPMTSVAPPPSVLSQEPRLLISGMDQPLPLRTDLI

SEQ ID NO: 370 - protein, 43 aa, Homo sapiens
  REGION 1..43: note = Human STING C-terminal tail (CTT)
EKEEVTVGSLKTSAVPSTSTMSQEPELLISGMEKPLPLRTDFS

SEQ ID NO: 371 - protein, 43 aa, Sarcophilus harrisii
  REGION 1..43: note = Tasmanian devil STING C-terminal tail (CTT)
RQEEFAIGPKRAMTVTTSSTLSQEPQLLISGMEQPLSLRTDGF

SEQ ID NO: 372 - protein, 43 aa, Callithrix jacchus
  REGION 1..43: note = Marmoset STING C-terminal tail (CTT)
EEEEVTVGSLKTSEVPSTSTMSQEPELLISGMEKPLPLRSDLF

SEQ ID NO: 373 - protein, 42 aa, Bos taurus
  REGION 1..42: note = Cattle/Bovine STING C-terminal tail (CTT)
EREVTMGSTETSVMPGSSVLSQEPELLISGLEKPLPLRSDVF

SEQ ID NO: 374 - protein, 42 aa, Felis catus
  REGION 1..42: note = Cat STING C-terminal tail (CTT)
EREVTVGSVGTSMVRNPSVLSQEPNLLISGMEQPLPLRTDVF

SEQ ID NO: 375 - protein, 35 aa, Struthio camelus australis
  REGION 1..35: note = Ostrich STING C-terminal tail (CTT)
RQEEYTVCDGTLCSTDLSLQISESDLPQPLRSDCL

SEQ ID NO: 376 - protein, 42 aa, Sus scrofa
  REGION 1..42: note = Boar STING C-terminal tail (CTT)
EREVTMGSAETSVVPTSSTLSQEPELLISGMEQPLPLRSDIF

SEQ ID NO: 377 - protein, 43 aa, Rousettus aegyptiacus
  REGION 1..43: note = Bat STING C-terminal tail (CTT)
EKEEVTVGTVGTYEAPGSSTLHQEPELLISGMDQPLPLRTDIF

SEQ ID NO: 378 - protein, 48 aa, Trichechus manatus latirostris
  REGION 1..48: note = Manatee STING C-terminal tail (CTT)
EREEVTVGSVGTSVVPSPSSPSTSSLSQEPKLLISGMEQPLPLRTDVF

SEQ ID NO: 379 - protein, 43 aa, Nipponia nippon
  REGION 1..43: note = Crested ibis STING C-terminal tail (CTT)
CHEEYTVYEGNQPHNPSTTLHSTELNLQISESDLPQPLRSDCF

SEQ ID NO: 380 - protein, 43 aa, Latimeria chalumnae
  REGION 1..43: note = Coelacanth STING (SEQ ID NO:345) C-terminal tail(CTT)
QKEEYFMSEQTQPNSSSTSCLSTEPQLMISDTDAPHTLKRQVC

SEQ ID NO: 381 - protein, 42 aa, Latimeria chalumnae
  REGION 1..42: note = Coelacanth STING (SEQ ID NO:346) C-terminal tail(CTT)
QKEEYFMSEQTQPNSSSTSCLSTEPQLMISDTDAPHTLKSGF

SEQ ID NO: 382 - protein, 71 aa, Danio rerio
  REGION 1..71: note = Zebrafish STING C-terminal tail (CTT)
DGEIFMDPTNEVHPVPEEGPVGNCNGALQATFHEEPMSDEPTLMFSRPQSLRSEPVETTDYFNPSSAMKQN

SEQ ID NO: 383 - protein, 38 aa, Callorhinchus milii
  REGION 1..38: note = Ghost shark STING C-terminal tail (CTT)
LTEYPVAEPSNANETDCMSSEPHLMISDDPKPLRSYCP

SEQ ID NO: 384 - protein, 43 aa, Mus musculus
  REGION 1..43: note = Mouse STING C-terminal tail (CTT)
EKEEVTMNAPMTSVAPPPSVLSQEPRLLISGMDQPLPLRTDLI

SEQ ID NO: 385 - protein, 78 aa, Salmonella typhimurium
  REGION 1..78: note = LppA (strain LT2/ ATCC 700720)
MNRTKLVLGAVILGSTLLAGCSSNAKIDQLSSDVQTLNAKVDQLSNDVNAMRSDVQAAKDDAARANQRLDNQATKYRK

SEQ ID NO: 386 - protein, 79 aa, Salmonella typhimurium
  REGION 1..79: note = LppB (strain LT2/ ATCC 700720)
MNRTNQLILGAVVLGSTLLAGCSSNAKIDQLSSDVQTLSAKVEQLSNDVNAMRSDVQAAKDDAARANQRLDNKVFRICK

SEQ ID NO: 387 - DNA, 237 bp, Salmonella typhimurium
  misc_feature 1..237: note = lppA
  source 1..237: mol_type = genomic DNA
ttacttacggtatttagtagcctggttgtccagacgctggttagcgcgagctgcgtcgtctttagcagcctgaacgtcggaacgcattgcgttcacgtcgttgctcagctggtcaactttagcgttcagagtctgaacgtcagaagacagctgatcgattttagcgttgctggagcaaccagccagcagagtagaacccaggattaccgcgcccagtaccagtttagtacgattcat

SEQ ID NO: 388 - DNA, 240 bp, Salmonella typhimurium
  misc_feature 1..240: note = lppB
  source 1..240: mol_type = genomic DNA
ttatttacagatgcggaatactttgttgtccagacgttggttcgcgcgagcagcatcgtctttagcagcctgaacgtcggaacgcattgcatttacgtcattactcagttgctcaactttagcgctcagcgtctgtacatcggaagacaactgatcgattttagcgttgcttgaacaacctgccagtaacgtggaacccagaactactgcacctaagatcagctggttagtacggttcat

SEQ ID NO: 389-392 - skipped (4 entries)

SEQ ID NO: 393 - DNA, 45 bp, synthetic construct; identical to SEQ ID NO: 241
  misc_feature 1..45: note = bacterial promoter
  source 1..45: mol_type = other DNA

SEQ ID NO: 394 - DNA, 43 bp, synthetic construct
  misc_feature 1..43: note = bacterial promoter
  source 1..43: mol_type = other DNA
ttatgcttgacgctgcgtaaggtttttgttataatacaccaag

SEQ ID NO: 395 - DNA, 44 bp, synthetic construct
  misc_feature 1..44: note = bacterial promoter
  source 1..44: mol_type = other DNA
attatgtcttgacatgtagtgagtgggctggtaaatgcagcaag

SEQ ID NO: 396 - DNA, 631 bp, synthetic construct
  misc_feature 1..631: note = Salmonella rpsm promoter
  source 1..631: mol_type = other DNA
gatcccggagttcatgcgtgatgcaatgaaagtgccgttctacttcggtgggacctcactgcttatcgttgttgtcgtgattatggactttatggctcaagtgcaaactctgatgatgtccagtcagtatgagtctgcattgaagaaggcgaacctgaaaggctacggccgttaattggtcgcctgagaagttacggagagtaaaaatgaaagttcgtgcttccgtcaagaaattatgccgtaactgcaaaatcgttaagcgtgatggtgtcatccgtgtgatttgcagtgccgagccgaagcataaacagcgccaaggctgattttttcgcatatttttcttgcaaagttgggttgagctggctagattagccagccaatcttttgtatgtctgtacgtttccatttgagtatcctgaaaacgggcttttcagcatggtacgtacatattaaatagtaggagtgcatagtggcccgtatagcaggcattaacattcctgatcagaaacacgccgtgatcgcgttaacttcgatctacggtgtcggcaagacccgttctaaagccatcctggctgcagcgggtatcgctgaaaatgttaagatcctctagatttaagaaggagatatacat

SEQ ID NO: 397-398 - skipped (2 entries)

SEQ ID NO: 399 - DNA, 8330 bp, synthetic construct
  misc_feature 1..8330: note = synthetic DNA construct
  regulatory 1704..2007: note = enhancer - CMV enhancer; regulatory_class = enhancer
  regulatory 2008..2211: note = promoter - human cytomegalovirus (CMV) immediate earlypromoter; regulatory_class = promoter
  misc_feature 2256..2261: note = Kozak sequence
  misc_feature 2262..2845: note = mu4-1BBL ATG83-310 CO
  misc_feature 2955..3008: note = 2A peptide from Thosea asigna virus capsid protein
  misc_feature 3009..4010: note = mouse IL-12p40
  sig_peptide 3009..3027: note = IL-12p40 signal sequence
  misc_feature 4011..4055: note = Linker
  misc_feature 4056..4634: note = mouse IL-12p35 del1-22
  misc_feature 4644..4700: note = 2A peptide from porcine teschovirus-1 polyprotein
  gene 4701..5705: note = human STING
  regulatory 6389..6613: note = polyA_signal - bovine growth hormone polyadenylation signal; regulatory_class = polyA_signal_sequence
  source 1..8330: mol_type = other DNA
gaacaatggcgtgaagacctttgtgggcggtaactgtaccgttagcctgatgttgatgtcgctgggcggtctctttgcccataatctcgttgactgggtatccgtcgcgacctatcaggccgcctccggcggcggcgcgcgccatatgcgcgagctgttaacccagatgggtcagttgtatggccatgtcgccgatgaactggcgacgccgtcttccgcaattcttgatattgaacgcaaagttacggcattgacccgcagcggcgagctgccggttgataactttggcgtaccgctggcgggaagcctgatcccctggatcgacaaacagctcgataacggccagagccgcgaagagtggaaaggccaggcggaaaccaacaagattctcaatactgcctctgtgattccggttgatggtttgtgtgtgcgcgtcggcgcgctgcgctgtcacagccaggcgttcaccatcaagctgaaaaaagaggtatccattccgacggtggaagaactgctggcggcacataatccgtgggcgaaagtggtgccgaacgatcgtgatatcactatgcgcgaattaaccccggcggcggtgaccggcacgttgactacgccggttggtcgtctgcgtaagctgaacatggggccagagttcttgtcggcgtttaccgtaggcgaccagttgttatggggcgccgccgagccgctgcgtcgaatgctgcgccagttggcgtagttgataatctcatgaccaaaatcccttaacgtgagttttcgttccactgagcgtcagaccccgtagaaaagatcaaaggatcttcttgagatcctttttttctgcgcgtaatctgctgcttgcaaacaaaaaaaccaccgctaccagcggtggtttgtttgccggatcaagagctaccaactctttttccgaaggtaactggcttcagcagagcgcagataccaaatactgtccttctagtgtagccgtagttaggccaccacttcaagaactctgtagcaccgcctacatacctcgctctgctaatcctgttaccagtggctgctgccagtggcgataagtcgtgtcttaccgggttggactcaagacgatagttaccggataaggcgcagcggtcgggctgaacggggggttcgtgcacacagcccagcttggagcgaacgacctacaccgaactgagatacctacagcgtgagctatgagaaagcgccacgcttcccgaagggagaaaggcggacaggtatccggtaagcggcagggtcggaacaggagagcgcacgagggagcttccagggggaaacgcctggtatctttatagtcctgtcgggtttcgccacctctgacttgagcgtcgatttttgtgatgctcgtcaggggggcggagcctatggaaaaacgccagcaacgcggcctttttacggttcctggccttttgctggccttttgctcacatgttctttcctgcgttatcccctgattctgtggataaccgtattaccgcctttgagtgagctgataccgctcgccgcagccgaacgaccgagcgcagcgagtcagtgagcgaggaagcggtagagcgcccaatacgcaaaccgcctctccccgcgcgttggccgattcattaatgcagctggcacgacaggtttcccgactggaaagcgggcagtgagcgcaacgcaagtcgacccgttacataacttacggtaaatggcccgcctggctgaccgcccaacgacccccgcccattgacgtcaataatgacgtatgttcccatagtaacgccaatagggactttccattgacgtcaatgggtggagtatttacggtaaactgcccacttggcagtacatcaagtgtatcatatgccaagtacgccccctattgacgtcaatgacggtaaatggcccgcctggcattatgcccagtacatgaccttatgggactttcctacttggcagtacatctacgtattagtcatcgctattaccatggtgatgcggttttggcagtacatcaatgggcgtggatagcggtttgactcacggggatttccaagtctccaccccattgacgtcaatgggagtttgttttggcaccaaaatcaacgggactttccaaaatgtcgtaacaactccgccccattgacgcaaatgggcggtaggcgtgtacggtgggaggtctatataagcagagctggtttagtgaaccgtcttaagcgctagcgattacgccaagctcggccaccatgctctacggcctggtggccttggtgctcctcctgctgattgccgcctgtgtgccgatcttcacccggactgaacccagaccggcccttactatcaccacttcccctaacctcggcacccgcgaaaacaacgccgaccaggtcaccccggtgtcgcacatcggctgccccaacacgacacagcagggatcacccgtgtttgccaagctgctggcaaagaaccaggcctctctctgcaacaccaccctgaactggcacagccaggatggagctggctcatcgtacctgagccagggccttcgctacgaagaggacaagaaggaactggtggtggactccccgggactgtactacgtgttcctcgaactcaagctgtcgcctaccttcaccaacactgggcacaaagtgcagggatgggtgtccctggtgctgcaagccaagccccaagtcgacgacttcgacaacttggcgctgaccgtggagctgttcccgtgctccatggaaaacaagcttgtggaccgcagctggagccagctgcttctgctgaaagccggtcaccggctgtccgtgggactgagggcctacctccacggagcgcaagacgcctacagggactgggagctctcctatccgaataccacctcgttcgggctgttcctggtcaagccagacaatccttgggagggatcaggcgagggaagaggctcgcttctgacttgcggcgatgtcgaggaaaacccgggcccttgtcctcagaagctaaccatctcctggtttgccatcgttttgctggtgtctccactcatggccatgtgggagctggagaaagacgtttatgttgtagaggtggactggactcccgatgcccctggagaaacagtgaacctcacctgtgacacgcctgaagaagatgacatcacctggacctcagaccagagacatggagtcataggctctggaaagaccctgaccatcactgtcaaagagtttctagatgctggccagtacacctgccacaaaggaggcgagactctgagccactcacatctgctgctccacaagaaggaaaatggaatttggtccactgaaattttaaaaaatttcaaaaacaagactttcctgaagtgtgaagcaccaaattactccggacggttcacgtgctcatggctggtgcaaagaaacatggacttgaagttcaacatcaagagcagtagcagttcccctgactctcgggcagtgacatgtggaatggcgtctctgtctgcagagaaggtcacactggaccaaagggactatgagaagtattcagtgtcctgccaggaggatgtcacctgcccaactgccgaggagaccctgcccattgaactggcgttggaagcacggcagcagaataaatatgagaactacagcaccagcttcttcatcagggacatcatcaaaccagacccgcccaagaacttgcagatgaagcctttgaagaactcacaggtggaggtcagctgggagtaccctgactcctggagcactccccattcctacttctccctcaagttctttgttcgaatccagcgcaagaaagaaaagatgaaggagacagaggaggggtgtaaccagaaaggtgcgttcctcgtagagaagacatctaccgaagtccaatgcaaaggcgggaatgtctgcgtgcaagctcaggatcgctattacaattcctcatgcagcaagtgggcatgtgttccctgcagggtccgatccggtggcggtggctcgggcggtggtgggtcgggtggcggcggatctagggtcattccagtctctggacctgccaggtgtcttagccagtcccgaaacctgctgaagaccacagatgacatggtgaagacggccagagaaaaactgaaacattattcctgcactgctgaagacatcgatcatgaagacatcacacgggaccaaaccagcacattgaagacctgtttaccactggaactacacaagaacgagagttgcctggctactagagagacttcttccacaacaagagggagctgcctgcccccacagaagacgtctttgatgatgaccctgtgccttggtagcatctatgaggacttgaagatgtaccagacagagttccaggccatcaacgcagcacttcagaatcacaaccatcagcagatcattctagacaagggcatgctggtggccatcgatgagctgatgcagtctctgaatcataatggcgagactctgcgccagaaacctcctgtgggagaagcagacccttacagagtgaaaatgaagctctgcatcctgcttcacgccttcagcacccgcgtcgtgaccatcaacagggtgatgggctatctgagctccgccggaagcggagctactaatttctcactgctgaaacaggccggcgatgttgaagagaatccgggacctccccactccagcctgcatccatccatcccgtgtcccaggggtcacggggcccagaaggcagccttggttctgctgagtgcctgcctggtgaccctttgggggctaggagagccaccagagcacactctccggtacctggtcctccacctagcctccctgcagctgggactgctgttaaacggggtctgcagcctggctgaggagctgcgccacatccactccaggtaccggggcagctactggaggactgtgcgggcctgcctgggctgccccctccgccgtggggccctgttgctgctgtccatctatttctactactccctcccaaatgcggtcggcccgcccttcacttggatgcttgccctcctgggcctctcgcaggcactgaacatcctcctgggcctcaagggcctggccccagctgagatctctgcagtgtgtgaaaaagggaatttcaacgtggcccatgggctggcatggtcatattacatcggatatctgcggctgatcctgccagagctccaggcccggattcgaacttacaatcagcattacaacaacctgctacggggtgcagtgagccagcggctgtatattctcctcccattggactgtggggtgcctgataacctgagtatggctgaccccaacattcgcttcctggataaactgccccagcagaccggtgaccgtgctggcatcaaggatcgggtttacagcaacagcatctatgagcttctggagaacgggcagcgggcgggcacctgtgtcctggagtacgccacccccttgcagactttgtttgccatgtcacaatacagtcaagctggctttagccgggaggatggccttgagcaggccaaactcttctgccggacacttgaggacatcctggcagatgcccctgagtctcagaacaactgccgcctcattgcctaccaggaacctgcagatgacagcagcttctcgctgtcccaggaggttctccggcacctgcggcaggagaggcaagaggaatttgccatcggccccaaaagagcgatgacagtgactacttcctccactctcagccaggagccccagttgctcattagcgggatggagcaaccgctttctctgcgcacagacgggttctgaaccggtatgttgctcggcaacggcctggtctgtgccaagtgtttgctgacgcaacccccactggctggggcttggccataggccatcagcgcatgcgtggaacctttgtggctcctctgccgatccatactgcggaactcctagccgcttgttttgctcgcagccggtctggggcaaagctcatcggaactgacaattctgtcgtcctctcgcggaaatatacatcgtttccatggctgctaggttgtactgccaactgcatccttcgcgggacgtcctttgtttacgtcccgtcggcgctgaatcccgcggacgacccctctcggggccgcttgggactctctcgtccccttctccgtctgccgttccagccgaccacggggcgcacctctctttacgcggtctccccgtctgtgccttctcatctgccggtccgtgtgcacttcgcttcacctctgcacgttgcatggagaccaccgtgaacgcccatcagatcctgcccaaggtcttacataagaggactcttggactcccagcaatgtcggcgcgccctgtgccttctagttgccagccatctgttgtttgcccctcccccgtgccttccttgaccctggaaggtgccactcccactgtcctttcctaataaaatgaggaaattgcatcgcattgtctgagtaggtgtcattctattctggggggtggggtggggcaggacagcaagggggaggattgggaagacaatagcaggcatgctggggatgcggtgggctctatggggatccgctccggctcgagttaagccagccccgacacccgccaacacccgctgacgcgccctgacgggcttgtctgctcccggcatccgcttacagacaagctgtgaccgtctccgggagctgcatgtgtcagaggttttcaccgtcatcaccgaaacgcgcgagacgaaagggcctcgtgatacgcctatttttataggttaatgtcatgataataatggtttcttagacgtcaggtggcacttttcggggaaatgtgaagctttagaaaaactcatcgagcatcaaatgaaactgcaatttattcatatcaggattatcaataccatatttttgaaaaagccgtttctgtaatgaaggagaaaactcaccgaggcagttccataggatggcaagatcctggtatcggtctgcgattccgactcgtccaacatcaatacaacctattaatttcccctcgtcaaaaataaggttatcaagtgagaaatcaccatgagtgacgactgaatccggtgagaatggcaaaagtttatgcatttctttccagacttgttcaacaggccagccattacgctcgtcatcaaaatcactcgcatcaaccaaaccgttattcattcgtgattgcgcctgagcgagacgaaatacgcgatcgctgttaaaaggacaattacaaacaggaatcgaatgcaaccggcgcaggaacactgccagcgcatcaacaatattttcacctgaatcaggatattcttctaatacctggaatgctgtttttccggggatcgcagtggtgagtaaccatgcatcatcaggagtacggataaaatgcttgatggtcggaagaggcataaattccgtcagccagtttagtctgaccatctcatctgtaacatcattggcaacgctacctttgccatgtttcagaaacaactctggcgcatcgggcttcccatacaagcgatagattgtcgcacctgattgcccgacattatcgcgagcccatttatacccatataaatcagcatccatgttggaatttaatcgcggcctcgacgtttcccgttgaatatggctcataacaccccttgtattactgtttatgtaagcagacagttttattgttcatgatgatatatttttatcttgtgcaatgtaacatcagagattttgagacacgggccagagctgcaagcttctgtcagaccaagtttactcatatatactttagattgatttaaaacttcatttttaatttaaaaggatctaggtgaagatcctttatggtgaaggatgcgccacaggatactggcgcgcatacacagcacatctctttgcaggaaaaaaacgctatgaaaaatgttggttttatcggctggcgcggaatggtcggctctgttctcatgcaacgcatggtagaggagcgcgatttcgacgctattcgccctgttttcttttctacctcccagtttggacaggcggcgcccaccttcggcgacacctccaccggcacgctacaggacgcttttgatctggatgcgctaaaagcgctcgatatcatcgtgacctgccagggcggcgattataccaacgaaatttatccaaagctgcgcgaaagcggatggcagggttactggattgatgcggcttctacgctgcgcatgaaagatgatgccattattattctcgacccggtcaaccaggacgtgattaccgacggcct

SEQ ID NO: 400 - DNA, 1566 bp, Homo sapiens
  misc_feature 1..1566: note = Interleukin 15 receptor subunit alpha (IL15RA),transcript variant 1, mRNA (GenBank Accession No.:NM_002189.4)
  source 1..1566: mol_type = genomic DNA
ctgggcagcgctcgcccggggagtccagcggtgtcctgtggagctgccgccatggccccgcggcgggcgcgcggctgccggaccctcggtctcccggcgctgctactgctgctgctgctccggccgccggcgacgcggggcatcacgtgccctccccccatgtccgtggaacacgcagacatctgggtcaagagctacagcttgtactccagggagcggtacatttgtaactctggtttcaagcgtaaagccggcacgtccagcctgacggagtgcgtgttgaacaaggccacgaatgtcgcccactggacaacccccagtctcaaatgcattagagaccctgccctggttcaccaaaggccagcgccaccctccacagtaacgacggcaggggtgaccccacagccagagagcctctccccttctggaaaagagcccgcagcttcatctcccagctcaaacaacacagcggccacaacagcagctattgtcccgggctcccagctgatgccttcaaaatcaccttccacaggaaccacagagataagcagtcatgagtcctcccacggcaccccctctcagacaacagccaagaactgggaactcacagcatccgcctcccaccagccgccaggtgtgtatccacagggccacagcgacaccactgtggctatctccacgtccactgtcctgctgtgtgggctgagcgctgtgtctctcctggcatgctacctcaagtcaaggcaaactcccccgctggccagcgttgaaatggaagccatggaggctctgccggtgacttgggggaccagcagcagagatgaagacttggaaaactgctctcaccacctatgaaactcggggaaaccagcccagctaagtccggagtgaaggagcctctctgctttagctaaagacgactgagaagaggtgcaaggaagcgggctccaggagcaagctcaccaggcctctcagaagtcccagcaggatctcacggactgccgggtcggcgcctcctgcgcgagggagcaggttctccgcattcccatgggcaccacctgcctgcctgtcgtgccttggacccagggcccagcttcccaggagagaccaaaggcttctgagcaggatttttatttcattacagtgtgagctgcctggaatacatgtggtaatgaaataaaaaccctgccccgaatcttccgtccctcatcctaactttcagttcacagagaaaagtgacatacccaaagctctctgtcaattacaaggcttctcctggcgtgggagacgtctacagggaagacaccagcgtttgggcttctaaccaccctgtctccagctgctctgcacacatggacagggacctgggaaaggtgggagagatgctgagcccagcgaatcctctccattgaaggattcaggaagaagaaaactcaactcagtgccattttacgaatatatgcgtttatatttatacttccttgtctattatatctatacattatatattatttgtattttgacattgtaccttgtataaacaaaataaaacatctattttcaata

SEQ ID NO: 401 - protein, 267 aa, Homo sapiens
  REGION 1..267: note = Mature Human IL-15 Receptor Subunit Alpha(IL-15RA; UniProtKB Accession No.: Q13261)
MAPRRARGCRTLGLPALLLLLLLRPPATRGITCPPPMSVEHADIWVKSYSLYSRERYICNSGFKRKAGTSSLTECVLNKATNVAHWTTPSLKCIRDPALVHQRPAPPSTVTTAGVTPQPESLSPSGKEPAASSPSSNNTAATTAAIVPGSQLMPSKSPSTGTTEISSHESSHGTPSQTTAKNWELTASASHQPPGVYPQGHSDTTVAISTSTVLLCGLSAVSLLACYLKSRQTPPLASVEMEAMEALPVTWGTSSRDEDLENCSHHL

SEQ ID NO: 402 - DNA, 2015 bp, Homo sapiens
  misc_feature 1..2015: note = IL-15 (IL-15 single chain (sc)), transcriptvariant 3, mRNA (GenBank Accession No.:NM_000585.5)
  source 1..2015: mol_type = genomic DNA
cttttcgccaggggttgggactccgggtggcaggcgcccgggggaatcccagctgactcgctcactgccttcgaagtccggcgccccccgggagggaactgggtggccgcaccctcccggctgcggtggctgtcgccccccaccctgcagccaggactcgatggagaatccattccaatatatggccatgtggctctttggagcaatgttccatcatgttccatgctgctgacgtcacatggagcacagaaatcaatgttagcagatagccagcccatacaagatcgtattgtattgtaggaggcattgtggatggatggctgctggaaaccccttgccatagccagctcttcttcaatacttaaggatttaccgtggctttgagtaatgagaatttcgaaaccacatttgagaagtatttccatccagtgctacttgtgtttacttctaaacagtcattttctaactgaagctggcattcatgtcttcattttgggctgtttcagtgcagggcttcctaaaacagaagccaactgggtgaatgtaataagtgatttgaaaaaaattgaagatcttattcaatctatgcatattgatgctactttatatacggaaagtgatgttcaccccagttgcaaagtaacagcaatgaagtgctttctcttggagttacaagttatttcacttgagtccggagatgcaagtattcatgatacagtagaaaatctgatcatcctagcaaacaacagtttgtcttctaatgggaatgtaacagaatctggatgcaaagaatgtgaggaactggaggaaaaaaatattaaagaatttttgcagagttttgtacatattgtccaaatgttcatcaacacttcttgattgcaattgattctttttaaagtgtttctgttattaacaaacatcactctgctgcttagacataacaaaacactcggcatttcaaatgtgctgtcaaaacaagtttttctgtcaagaagatgatcagaccttggatcagatgaactcttagaaatgaaggcagaaaaatgtcattgagtaatatagtgactatgaacttctctcagacttactttactcatttttttaatttattattgaaattgtacatatttgtggaataatgtaaaatgttgaataaaaatatgtacaagtgttgttttttaagttgcactgatattttacctcttattgcaaaatagcatttgtttaagggtgatagtcaaattatgtattggtggggctgggtaccaatgctgcaggtcaacagctatgctggtaggctcctgccagtgtggaaccactgactactggctctcattgacttccttactaagcatagcaaacagaggaagaatttgttatcagtaagaaaaagaagaactatatgtgaatcctcttctttatactgtaatttagttattgatgtataaagcaactgttatgaaataaagaaattgcaataactggcatataatgtccatcagtaaatcttggtggtggtggcaataataaacttctactgataggtagaatggtgtgcaagcttgtccaatcacggattgcaggccacatgcggcccaggacaactttgaatgtggcccaacacaaattcataaactttcatacatctcgtttttagctcatcagctatcattagcggtagtgtatttaaagtgtggcccaagacaattcttcttattccaatgtggcccagggaaatcaaaagattggatgcccctggtatagaaaactaatagtgacagtgttcatatttcatgctttcccaaatacaggtattttattttcacattctttttgccatgtttatataataataaagaaaaaccctgttgatttgttggagccattgttatctgacagaaaataattgtttatattttttgcactacactgtctaaaattagcaagctctcttctaatggaactgtaagaaagatgaaatatttttgttttattataaatttatttcaccttaa

SEQ ID NO: 403 - protein, 162 aa, Homo sapiens
  REGION 1..162: note = mature Human IL-15 (IL-15sc) (UniProtKB AccessionNo.: P40933)
MRISKPHLRSISIQCYLCLLLNSHFLTEAGIHVFILGCFSAGLPKTEANWVNVISDLKKIEDLIQSMHIDATLYTESDVHPSCKVTAMKCFLLELQVISLESGDASIHDTVENLIILANNSLSSNGNVTESGCKECEELEEKNIKEFLQSFVHIVQMFINTS

SEQ ID NO: 404 - protein, 243 aa, synthetic construct
  REGION 1..243: note = Human IL-15Ralpha-IL-15sc fusion protein
  REGION 1..243: note = Portion of human IL-15Ralpha
  REGION 1..243: note = (GGGGS)4linker
  REGION 1..243: note = Portion of human IL-15sc
MAPRRARGCRTLGLPALLLLLLLRPPATRGITCPPPMSVEHADIWVKSYSLYSRERYICNSGFKRKAGTSSLTECVLNKATNVAHWTTPSLKCIRDPALVHQRPAPPSGGGGSGGGGSGGGGSGGGGSANWVNVISDLKKIEDLIQSMHIDATLYTESDVHPSCKVTAMKCFLLELQVISLESGDASIHDTVENLIILANNSLSSNGNVTESGCKECEELEEKNIKEFLQSFVHIVQMFINTS

SEQ ID NO: 405 - protein, 263 aa, Mus musculus
  PEPTIDE 1..263: note = Murine IL-15Ralpha (Interleukin-15 receptorsubunit alpha; UniProtKB Accession No.: Q60819)
MASPQLRGYGVQAIPVLLLLLLLLLLPLRVTPGTTCPPPVSIEHADIRVKNYSVNSRERYVCNSGFKRKAGTSTLIECVINKNTNVAHWTTPSLKCIRDPSLAHYSPVPTVVTPKVTSQPESPSPSAKEPEAFSPKSDTAMTTETAIMPGSRLTPSQTTSAGTTGTGSHKSSRAPSLAATMTLEPTASTSLRITEISPHSSKMTKVAISTSVLLVGAGVVMAFLAWYIKSRQPSQPCRVEVETMETVPMTVRASSKEDEDTGA

SEQ ID NO: 406 - protein, 162 aa, Mus musculus
  REGION 1..162: note = Murine IL-15 (single chain (sc); UniProtKBAccession No.: P48346)
MKILKPYMRNTSISCYLCFLLNSHFLTEAGIHVFILGCVSVGLPKTEANWIDVRYDLEKIESLIQSIHIDTTLYTDSDFHPSCKVTAMNCFLLELQVILHEYSNMTLNETVRNVLYLANSTLSSNKNVAESGCKECEELEEKTFTEFLQSFIRIVQMFINTS

SEQ ID NO: 407 - protein, 266 aa, synthetic construct
  REGION 1..266: note = Murine (mu) IL-15Ralpha-IL-15sc fusion protein
  REGION 1..266: note = Portion of murine IL-15Ralpha
  REGION 1..266: note = (GGGGS)4 linker
  REGION 1..266: note = Portion of murine IL-15 (muIL-15sc)
MASPQLRGYGVQAIPVLLLLLLLLLLPLRVTPGTTCPPPVSIEHADIRVKNYSVNSRERYVCNSGFKRKAGTSTLIECVINKNTNVAHWTTPSLKCIRDPSLAHYSPVPTVVTPKVTSQPESPSPSAKEPEAGGGGSGGGGSGGGGSGGGGSNWIDVRYDLEKIESLIQSIHIDTTLYTDSDFHPSCKVTAMNCFLLELQVILHEYSNMTLNETVRNVLYLANSTLSSNKNVAESGCKECEELEEKTFTEFLQSFIRIVQMFINTS

SEQ ID NO: 408 - DNA, 40 bp, synthetic construct
  misc_feature 1..40: note = New spacer
  source 1..40: mol_type = other DNA
acgtcttctctttttaaaggacctcgtgaaataaaagtgc

SEQ ID NO: 409 - DNA, 80 bp, synthetic construct
  misc_feature 1..80: note = Longer spacer
  source 1..80: mol_type = other DNA
tccgagccaagtaaggaggtccctctctctctctccccccacgtcttctctttttaaaggacctcgtgaaataaaagtgc

SEQ ID NO: 410 - DNA, 1515 bp, synthetic construct
  misc_feature 1..1515: note = DLL3HL x CD3HL TCRA
  source 1..1515: mol_type = other DNA
atggaaactgatactctgctgctctgggtgctgctgctttgggtgcccggttccaccggggatcaggtgcagctggtacagagcggcgcagaagtgaagaagcccggagccagcgttaaagtgtcctgcaaggcctctggctacaccttcaccaactatggcatgaactgggtccggcaggctcctgggcaagggctggagtggatgggctggatcaatacttatacaggtgaaccaacctatgcggatgattttaaaggaagagtgaccatgactacagacacatctacttccacagcatacatggagttgcgcagcctccgatctgatgacactgctgtgtactactgtgccaggattggagacagttcaccgagtgactactgggggcaaggtacgcttgttaccgtctcctcaggtggcggtggctcgggcggtggtgggtcgggtggcggcggatctgaaattgtgatgacccagagccctgcaactttgtctgtttctccaggggagagggccacactttcctgtaaagcttcccagtctgtcagcaatgatgtggtgtggtaccagcagaagccaggacaagcaccccggctactcatctattatgcgagcaacagatatactggaattcctgcccgcttcagtggctcaggttcagggacagagttcaccctgactatatcgtccctgcagagtgaagactttgctgtatactactgccagcaagactacacgagcccctggacatttggccagggcaccaagctggagatcaaaggcgggggcggctctgaggtgcagctggtggagtctgggggaggcttggtgcagcctggaaagtccctgaaactctcctgtgaggcctctggattcaccttcagcggctatggcatgcactgggtccgccaggctccagggagggggctggagtcggtcgcatacattactagtagtagtattaatatcaaatatgctgacgctgtgaaaggccggttcaccgtctccagagacaatgccaagaacttactgtttctacaaatgaacattctcaagtctgaggacacagccatgtactactgtgcaagattcgactgggacaaaaattactggggccaaggaaccatggtcaccgtctcctcaggcggaggtggttccggtgggggtggtagcggaggtggtgggtcagacatccagatgacccagtctccatcatcactgcctgcctccctgggagacagagtcactatcaattgtcaggccagtcaggacattagcaattatttaaactggtaccagcagaaaccagggaaagctcctaagctcctgatctattatacaaataaattggcagatggagtcccatcaaggttcagtggcagtggttctgggagagattcttctttcactatcagcagcctggaatccgaagatattggatcttattactgtcaacagtattataactatccgtggacgttcggacctggcaccaagctggaaatcaaatga

SEQ ID NO: 411 - protein, 504 aa, synthetic construct
  REGION 1..504: note = DLL3HL x CD3HL TCRA
METDTLLLWVLLLWVPGSTGDQVQLVQSGAEVKKPGASVKVSCKASGYTFTNYGMNWVRQAPGQGLEWMGWINTYTGEPTYADDFKGRVTMTTDTSTSTAYMELRSLRSDDTAVYYCARIGDSSPSDYWGQGTLVTVSSGGGGSGGGGSGGGGSEIVMTQSPATLSVSPGERATLSCKASQSVSNDVVWYQQKPGQAPRLLIYYASNRYTGIPARFSGSGSGTEFTLTISSLQSEDFAVYYCQQDYTSPWTFGQGTKLEIKGGGGSEVQLVESGGGLVQPGKSLKLSCEASGFTFSGYGMHWVRQAPGRGLESVAYITSSSINIKYADAVKGRFTVSRDNAKNLLFLQMNILKSEDTAMYYCARFDWDKNYWGQGTMVTVSSGGGGSGGGGSGGGGSDIQMTQSPSSLPASLGDRVTINCQASQDISNYLNWYQQKPGKAPKLLIYYTNKLADGVPSRFSGSGSGRDSSFTISSLESEDIGSYYCQQYYNYPWTFGPGTKLEIK

SEQ ID NO: 412 - protein, 8 aa, synthetic construct
  REGION 1..8: note = FLAG tag
DYKDDDDK

SEQ ID NO: 413 - protein, 512 aa, synthetic construct
  REGION 1..512: note = DLL3HL x CD3HL-FLAG TCRA
METDTLLLWVLLLWVPGSTGDQVQLVQSGAEVKKPGASVKVSCKASGYTFTNYGMNWVRQAPGQGLEWMGWINTYTGEPTYADDFKGRVTMTTDTSTSTAYMELRSLRSDDTAVYYCARIGDSSPSDYWGQGTLVTVSSGGGGSGGGGSGGGGSEIVMTQSPATLSVSPGERATLSCKASQSVSNDVVWYQQKPGQAPRLLIYYASNRYTGIPARFSGSGSGTEFTLTISSLQSEDFAVYYCQQDYTSPWTFGQGTKLEIKGGGGSEVQLVESGGGLVQPGKSLKLSCEASGFTFSGYGMHWVRQAPGRGLESVAYITSSSINIKYADAVKGRFTVSRDNAKNLLFLQMNILKSEDTAMYYCARFDWDKNYWGQGTMVTVSSGGGGSGGGGSGGGGSDIQMTQSPSSLPASLGDRVTINCQASQDISNYLNWYQQKPGKAPKLLIYYTNKLADGVPSRFSGSGSGRDSSFTISSLESEDIGSYYCQQYYNYPWTFGPGTKLEIKDYKDDDDK

SEQ ID NO: 414 - DNA, 1515 bp, synthetic construct
  misc_feature 1..1515: note = DLL3LH x CD3HL TCRA
  source 1..1515: mol_type = other DNA
atggaaactgatactctgctgctctgggtgctgctgctttgggtgcccggttccaccggggatgaaattgtgatgacccagagccctgcaactttgtctgtttctccaggggagagggccacactttcctgtaaagcttcccagtctgtcagcaatgatgtggtgtggtaccagcagaagccaggacaagcaccccggctactcatctattatgcgagcaacagatatactggaattcctgcccgcttcagtggctcaggttcagggacagagttcaccctgactatatcgtccctgcagagtgaagactttgctgtatactactgccagcaagactacacgagcccctggacatttggccagggcaccaagctggagatcaaaggtggcggtggctcgggcggtggtgggtcgggtggcggcggatctcaggtgcagctggtacagagcggcgcagaagtgaagaagcccggagccagcgttaaagtgtcctgcaaggcctctggctacaccttcaccaactatggcatgaactgggtccggcaggctcctgggcaagggctggagtggatgggctggatcaatacttatacaggtgaaccaacctatgcggatgattttaaaggaagagtgaccatgactacagacacatctacttccacagcatacatggagttgcgcagcctccgatctgatgacactgctgtgtactactgtgccaggattggagacagttcaccgagtgactactgggggcaaggtacgcttgttaccgtctcctcaggcgggggcggctctgaggtgcagctggtggagtctgggggaggcttggtgcagcctggaaagtccctgaaactctcctgtgaggcctctggattcaccttcagcggctatggcatgcactgggtccgccaggctccagggagggggctggagtcggtcgcatacattactagtagtagtattaatatcaaatatgctgacgctgtgaaaggccggttcaccgtctccagagacaatgccaagaacttactgtttctacaaatgaacattctcaagtctgaggacacagccatgtactactgtgcaagattcgactgggacaaaaattactggggccaaggaaccatggtcaccgtctcctcaggcggaggtggttccggtgggggtggtagcggaggtggtgggtcagacatccagatgacccagtctccatcatcactgcctgcctccctgggagacagagtcactatcaattgtcaggccagtcaggacattagcaattatttaaactggtaccagcagaaaccagggaaagctcctaagctcctgatctattatacaaataaattggcagatggagtcccatcaaggttcagtggcagtggttctgggagagattcttctttcactatcagcagcctggaatccgaagatattggatcttattactgtcaacagtattataactatccgtggacgttcggacctggcaccaagctggaaatcaaatga

SEQ ID NO: 415 - protein, 504 aa, synthetic construct
  REGION 1..504: note = DLL3LH x CD3HL TCRA
METDTLLLWVLLLWVPGSTGDEIVMTQSPATLSVSPGERATLSCKASQSVSNDVVWYQQKPGQAPRLLIYYASNRYTGIPARFSGSGSGTEFTLTISSLQSEDFAVYYCQQDYTSPWTFGQGTKLEIKGGGGSGGGGSGGGGSQVQLVQSGAEVKKPGASVKVSCKASGYTFTNYGMNWVRQAPGQGLEWMGWINTYTGEPTYADDFKGRVTMTTDTSTSTAYMELRSLRSDDTAVYYCARIGDSSPSDYWGQGTLVTVSSGGGGSEVQLVESGGGLVQPGKSLKLSCEASGFTFSGYGMHWVRQAPGRGLESVAYITSSSINIKYADAVKGRFTVSRDNAKNLLFLQMNILKSEDTAMYYCARFDWDKNYWGQGTMVTVSSGGGGSGGGGSGGGGSDIQMTQSPSSLPASLGDRVTINCQASQDISNYLNWYQQKPGKAPKLLIYYTNKLADGVPSRFSGSGSGRDSSFTISSLESEDIGSYYCQQYYNYPWTFGPGTKLEIK

SEQ ID NO: 416 - DNA, 1539 bp, synthetic construct
  misc_feature 1..1539: note = DLL3LH x CD3HL-FLAG TCRA
  source 1..1539: mol_type = other DNA
atggaaactgatactctgctgctctgggtgctgctgctttgggtgcccggttccaccggggatgaaattgtgatgacccagagccctgcaactttgtctgtttctccaggggagagggccacactttcctgtaaagcttcccagtctgtcagcaatgatgtggtgtggtaccagcagaagccaggacaagcaccccggctactcatctattatgcgagcaacagatatactggaattcctgcccgcttcagtggctcaggttcagggacagagttcaccctgactatatcgtccctgcagagtgaagactttgctgtatactactgccagcaagactacacgagcccctggacatttggccagggcaccaagctggagatcaaaggtggcggtggctcgggcggtggtgggtcgggtggcggcggatctcaggtgcagctggtacagagcggcgcagaagtgaagaagcccggagccagcgttaaagtgtcctgcaaggcctctggctacaccttcaccaactatggcatgaactgggtccggcaggctcctgggcaagggctggagtggatgggctggatcaatacttatacaggtgaaccaacctatgcggatgattttaaaggaagagtgaccatgactacagacacatctacttccacagcatacatggagttgcgcagcctccgatctgatgacactgctgtgtactactgtgccaggattggagacagttcaccgagtgactactgggggcaaggtacgcttgttaccgtctcctcaggcgggggcggctctgaggtgcagctggtggagtctgggggaggcttggtgcagcctggaaagtccctgaaactctcctgtgaggcctctggattcaccttcagcggctatggcatgcactgggtccgccaggctccagggagggggctggagtcggtcgcatacattactagtagtagtattaatatcaaatatgctgacgctgtgaaaggccggttcaccgtctccagagacaatgccaagaacttactgtttctacaaatgaacattctcaagtctgaggacacagccatgtactactgtgcaagattcgactgggacaaaaattactggggccaaggaaccatggtcaccgtctcctcaggcggaggtggttccggtgggggtggtagcggaggtggtgggtcagacatccagatgacccagtctccatcatcactgcctgcctccctgggagacagagtcactatcaattgtcaggccagtcaggacattagcaattatttaaactggtaccagcagaaaccagggaaagctcctaagctcctgatctattatacaaataaattggcagatggagtcccatcaaggttcagtggcagtggttctgggagagattcttctttcactatcagcagcctggaatccgaagatattggatcttattactgtcaacagtattataactatccgtggacgttcggacctggcaccaagctggaaatcaaagattataaagacgatgatgacaagtga

SEQ ID NO: 417 - protein, 512 aa, synthetic construct
  REGION 1..512: note = DLL3LH x CD3HL-FLAG TCRA
METDTLLLWVLLLWVPGSTGDEIVMTQSPATLSVSPGERATLSCKASQSVSNDVVWYQQKPGQAPRLLIYYASNRYTGIPARFSGSGSGTEFTLTISSLQSEDFAVYYCQQDYTSPWTFGQGTKLEIKGGGGSGGGGSGGGGSQVQLVQSGAEVKKPGASVKVSCKASGYTFTNYGMNWVRQAPGQGLEWMGWINTYTGEPTYADDFKGRVTMTTDTSTSTAYMELRSLRSDDTAVYYCARIGDSSPSDYWGQGTLVTVSSGGGGSEVQLVESGGGLVQPGKSLKLSCEASGFTFSGYGMHWVRQAPGRGLESVAYITSSSINIKYADAVKGRFTVSRDNAKNLLFLQMNILKSEDTAMYYCARFDWDKNYWGQGTMVTVSSGGGGSGGGGSGGGGSDIQMTQSPSSLPASLGDRVTINCQASQDISNYLNWYQQKPGKAPKLLIYYTNKLADGVPSRFSGSGSGRDSSFTISSLESEDIGSYYCQQYYNYPWTFGPGTKLEIKDYKDDDDK

SEQ ID NO: 418 - protein, 531 aa, synthetic construct
  REGION 1..531: note = MT103 (CD19LH x CD3HL TCRA)
MGWSCIILFLVATATGVHSDYKDDDDKDIQLTQSPASLAVSLGQRATISCKASQSVDYDGDSYLNWYQQIPGQPPKLLIYDASNLVSGIPPRFSGSGSGTDFTLNIHPVEKVDAATYHCQQSTEDPWTFGGGTKLEIKGGGGSGGGGSGGGGSQVQLQQSGAELVRPGSSVKISCKASGYAFSSYWMNWVKQRPGQGLEWIGQIWPGDGDTNYNGKFKGKATLTADESSSTAYMQLSSLASEDSAVYFCARRETTTVGRYYYAMDYWGQGTTVTVSSGGGGSDIKLQQSGAELARPGASVKMSCKTSGYTFTRYTMHWVKQRPGQGLEWIGYINPSRGYTNYNQKFKDKATLTTDKSSSTAYMQLSSLTSEDSAVYYCARYYDDHYCLDYWGQGTTLTVSSVEGGSGGSGGSGGSGGVDDIQLTQSPAIMSASPGEKVTMTCRASSSVSYMNWYQQKSGTSPKRWIYDTSKVASGVPYRFSGSGSGTSYSLTISSMEAEDAATYYCQQWSSNPLTFGAGTKLELKHHHHHH

SEQ ID NO: 419 - DNA, 26 bp, synthetic construct
  misc_feature 1..26: note = purm-1 primer
  source 1..26: mol_type = other DNA
ccagatgtggcttgtttatacttcgc

SEQ ID NO: 420 - DNA, 25 bp, synthetic construct
  misc_feature 1..25: note = purm-2 primer
  source 1..25: mol_type = other DNA
ccttattgctgaatactgccctgag

SEQ ID NO: 421 - DNA, 25 bp, synthetic construct
  misc_feature 1..25: note = purm-3 primer
  source 1..25: mol_type = other DNA
cgtgtcgcaattcttaatgccatag

SEQ ID NO: 422 - DNA, 23 bp, synthetic construct
  misc_feature 1..23: note = purm-4 primer
  source 1..23: mol_type = other DNA
caaacatcggactcagaatacgc

SEQ ID NO: 423 - DNA, 23 bp, synthetic construct
  misc_feature 1..23: note = purm-5 primer
  source 1..23: mol_type = other DNA
caggcgataaaggctaacaaccg

SEQ ID NO: 424 - DNA, 23 bp, synthetic construct
  misc_feature 1..23: note = purm-6 primer
  source 1..23: mol_type = other DNA
ttgacctggatcaaccaaaagcg

SEQ ID NO: 425 - DNA, 21 bp, synthetic construct
  misc_feature 1..21: note = acrd-1 primer
  source 1..21: mol_type = other DNA
cctgcgaccgatactgatgac

SEQ ID NO: 426 - DNA, 20 bp, synthetic construct
  misc_feature 1..20: note = acrd-3 primer
  source 1..20: mol_type = other DNA
gctactcgctacctggatgc

SEQ ID NO: 427 - DNA, 1500 bp, synthetic construct
  misc_feature 1..1500: note = anti-human CTLA-4 scFv-Fc
  source 1..1500: mol_type = other DNA
atggagacacctgcccagctgctgttcctgctgctgctgtggctgcccgacaccaccggcgagatcgtgctgacccagtctcctggcaccctgagcctgagccccggcgagagagccacactgagctgcagagcttctcagagcgtcggatcttcttatctggcctggtatcagcaaaagcccggacaagctcctcggctgctgatctacggcgccttcagccgggctacaggcatccctgatagattcagcggcagcggctctggcactgatttcaccctgaccattagcagactggaacctgaggacttcgccgtgtactactgccagcagtacgggagcagcccttggacctttggacaaggcaccaaggtggaaatcaagcgtggaggaggcggctcaggcggcggaggaagcggcggcggcggctccggcggcggaggcagccaggttcagctggttgaaagcggaggcggcgtggtccagcctggtagaagcctgcggctgtcttgcgccgccagcggctttacatttagcagctacaccatgcactgggtgcggcaggcccctggcaagggcctggaatgggtcaccttcatcagctacgacggcaacaacaagtactacgccgacagcgtgaaaggcagattcaccatcagcagagataattctaaaaacaccctgtacctgcaaatgaacagcctcagagccgaggataccgctatctactactgtgccagaacaggctggctgggccccttcgactactggggccagggcacactggtgaccgtgtctagcgagcctaagtcttccgataagacacacacctgccctccgtgccccgcccctgaactgctcggcggacctagcgtgttcctgttccctccaaagcctaaggacaccctgatgatctctcgaacacctgaggtgacctgcgtggtggtggacgtgtcccacgaggaccccgaggtgaagttcaactggtacgtggacggcgtggaagtgcacaacgccaagacaaaacctagagaggagcagtacaacagcacctacagagtggtgtccgtgctgaccgtgctgcaccaggactggctgaacggcaaggaatacaagtgcaaggtgtccaacaaggccctgcctgcccctatcgagaagaccatcagcaaggctaaaggccagcccagagagccccaggtgtacacactgcctccaagcagggacgagctgaccaagaaccaggtcagcctgacatgtctggtgaagggcttctacccttctgacatcgccgtggaatgggagagcaacggccagcccgagaacaactacaagacgacccctcctgtgctggacagcgacggatccttcttcctgtacagcaagctgacagttgataagtcccggtggcagcagggcaatgtgtttagctgtagcgtgatgcacgaggccctgcataatcactacacccagaaaagccttagcctgtccccaggcaaatga

SEQ ID NO: 428 - protein, 499 aa, synthetic construct
  REGION 1..499: note = anti-human CTLA-4 scFv-Fc
METPAQLLFLLLLWLPDTTGEIVLTQSPGTLSLSPGERATLSCRASQSVGSSYLAWYQQKPGQAPRLLIYGAFSRATGIPDRFSGSGSGTDFTLTISRLEPEDFAVYYCQQYGSSPWTFGQGTKVEIKRGGGGSGGGGSGGGGSGGGGSQVQLVESGGGVVQPGRSLRLSCAASGFTFSSYTMHWVRQAPGKGLEWVTFISYDGNNKYYADSVKGRFTISRDNSKNTLYLQMNSLRAEDTAIYYCARTGWLGPFDYWGQGTLVTVSSEPKSSDKTHTCPPCPAPELLGGPSVFLFPPKPKDTLMISRTPEVTCVVVDVSHEDPEVKFNWYVDGVEVHNAKTKPREEQYNSTYRVVSVLTVLHQDWLNGKEYKCKVSNKALPAPIEKTISKAKGQPREPQVYTLPPSRDELTKNQVSLTCLVKGFYPSDIAVEWESNGQPENNYKTTPPVLDSDGSFFLYSKLTVDKSRWQQGNVFSCSVMHEALHNHYTQKSLSLSPGK

SEQ ID NO: 429 - protein, 267 aa, synthetic construct
  REGION 1..267: note = anti-human CTLA-4 scFv
METPAQLLFLLLLWLPDTTGEIVLTQSPGTLSLSPGERATLSCRASQSVGSSYLAWYQQKPGQAPRLLIYGAFSRATGIPDRFSGSGSGTDFTLTISRLEPEDFAVYYCQQYGSSPWTFGQGTKVEIKRGGGGSGGGGSGGGGSGGGGSQVQLVESGGGVVQPGRSLRLSCAASGFTFSSYTMHWVRQAPGKGLEWVTFISYDGNNKYYADSVKGRFTISRDNSKNTLYLQMNSLRAEDTAIYYCARTGWLGPFDYWGQGTLVTVSS

SEQ ID NO: 430 - protein, 264 aa, synthetic construct
  REGION 1..264: note = Anti-Mouse CTLA-4 scFv
METDTLLLWVLLLWVPGSTGDIVMTQTTLSLPVSLGDQASISCRSSQSIVHSNGNTYLEWYLQKPGQSPKLLIYKVSNRFSGVPDRFSGSGSGTDFTLKISRVEAEDLGVYYCFQGSHVPYTFGGGTKLEIKGGGGSGGGGSGGGGSEAKLQESGPVLVKPGASVKMSCKASGYTFTDYYMNWVKQSHGKSLEWIGVINPYNGDTSYNQKFKGKATLTVDKSSSTAYMELNSLTSEDSAVYYCARYYGSWFAYWGQGTLVTVSS

SEQ ID NO: 431 - protein, 497 aa, synthetic construct
  REGION 1..497: note = Anti-Mouse CTLA-4 scFv-Fc
METDTLLLWVLLLWVPGSTGDIVMTQTTLSLPVSLGDQASISCRSSQSIVHSNGNTYLEWYLQKPGQSPKLLIYKVSNRFSGVPDRFSGSGSGTDFTLKISRVEAEDLGVYYCFQGSHVPYTFGGGTKLEIKGGGGSGGGGSGGGGSEAKLQESGPVLVKPGASVKMSCKASGYTFTDYYMNWVKQSHGKSLEWIGVINPYNGDTSYNQKFKGKATLTVDKSSSTAYMELNSLTSEDSAVYYCARYYGSWFAYWGQGTLVTVSSEPRGPTIKPCPPCKCPAPNLLGGPSVFIFPPKIKDVLMISLSPIVTCVVVDVSEDDPDVQISWFVNNVEVHTAQTQTHREDYNSTLRVVSALPIQHQDWMSGKEFKCKVNNKDLPAPIERTISKPKGSVRAPQVYVLPPPEEEMTKKQVTLTCMVTDFMPEDIYVEWTNNGKTELNYKNTEPVLDSDGSYFMYSKLRVEKKNWVERNSYSCSVVHEGLHNHHTTKSFSRTPGK

SEQ ID NO: 432 - DNA, 618 bp, Rickettsia prowazekii
  misc_feature 1..618: note = Phospholipase D gene (pld)
  source 1..618: mol_type = genomic DNA
atgaagagcaaaaataataaatttatagcagtatctatctcctttattttgggaatcgctttaggtatttatgtagagagtacttattattttactaatataataaatagcaaatcattttctttatctaatgcacaaataaactattatagtatttcagaactttcaagaagtaatgtgagtacatgttttactccacctgccggttgtactaaatttatagtgcagcagatagagaaagctgaagaatctatttatatgcaggcatatggtatgagcgattcattaattactactgcacttattaatgcacagatgcgaggagtaaaagtgagaatattactcgatcgtagtaatttaaagcagaaattttctaaattatatgaattacaacaagcaaaaattgatgttggcatagatacggtacctggcattgcccataataaagttataattattgataaaaagaaagtaataactggttcgtttaatttcacggtttctgctgataaacgtaatgctgaaaatgtaattcttatagaagatcggaaattagcagagtcttatttacaaaattggttcagtcggaaaacaacgagtaatgcagtacatttttag

SEQ ID NO: 433 - protein, 205 aa, Rickettsia prowazekii
  REGION 1..205: note = Phospholipase D (Pld) protein
MKSKNNKFIAVSISFILGIALGIYVESTYYFTNIINSKSFSLSNAQINYYSISELSRSNVSTCFTPPAGCTKFIVQQIEKAEESIYMQAYGMSDSLITTALINAQMRGVKVRILLDRSNLKQKFSKLYELQQAKIDVGIDTVPGIAHNKVIIIDKKKVITGSFNFTVSADKRNAENVILIEDRKLAESYLQNWFSRKTTSNAVHF

SEQ ID NO: 434 - DNA, 547 bp, synthetic construct
  misc_feature 1..547: note = VCIP IRES
  source 1..547: mol_type = other DNA
agaaaacaaacccaggcgatcacagcagcagccgccgcggcagcagcaccaacagcaggaggagcaggaggagccggaggaggaggaggaggaggaggcaaagttagagttggggctggcgctccggagttgctgggctcagcgcagctcccattcattaaggaaccagctgcggaggaaggtggccgagcgcccgcgctgcccactcgctcgctcgcgcactcagacgcgcgccacaacagcgcgccccaagctgcgcagctctgcaaaagtttctgctcgggatctggctctcttccccttggactttagaacgatttagggttgacagaggaaagcagaggcgcgcaggaggagcagaaaacaccaccttctgcagttggaggcaggcagccccggctgcactctagccgccgcgcccggagccggggccgacccgccactatccgcagcagcctcggccaggaggcgacccgggcgcctgggtgtgtggctgctgttgcgggacgtcttcgcggggcgggaggctcgcgccgcagccagcgcc

SEQ ID NO: 435 - protein, 380 aa, Homo sapiens
  REGION 1..380: note = Sialidase-2 (Human Neu2)
MASLPVLQKESVFQSGAHAYRIPALLYLPGQQSLLAFAEQRASKKDEHAELIVLRRGDYDAPTHQVQWQAQEVVAQARLDGHRSMNPCPLYDAQTGTLFLFFIAIPGQVTEQQQLQTRANVTRLCQVTSTDHGRTWSSPRDLTDAAIGPAYREWSTFAVGPGHCLQLHDRARSLVVPAYAYRKLHPIQRPIPSAFCFLSHDHGRTWARGHFVAQDTLECQVAEVETGEQRVVTLNARSHLRARVQAQSTNDGLDFQESQLVKKLVEPPPQGCQGSVISFPSPRSGPGSPAQWLLYTHPTHSWQRADLGAYLNPRPPAPEAWSEPVLLAKGSCAYSDLQSMGTGPDGSPLFGCLYEANDYEEIVFLMFTLKQAFPAEYLPQ

SEQ ID NO: 436 - protein, 235 aa, Homo sapiens
  REGION 1..235: note = Human FLT-3 Ligand
MTVLAPAWSPTTYLLLLLLLSSGLSGTQDCSFQHSPISSDFAVKIRELSDYLLQDYPVTVASNLQDEELCGGLWRLVLAQRWMERLKTVAGSKMQGLLERVNTEIHFVTKCAFQPPPSCLRFVQTNISRLLQETSEQLVALKPWITRQNFSRCLELQCQPDSSTLPPPWSPRPLEATAPTAPQPPLLLLLLLPVGLLLLAAAWCLHWQRTRRRTPRPGEQVPPVPSPQDLLLVEH

SEQ ID NO: 437 - protein, 391 aa, synthetic construct
  REGION 1..391: note = Human soluble TGF-beta Receptor II-Fc Fusion (husTGFbRII-Fc)
  REGION 1..159: note = misc_feature - Human soluble TGF-beta Receptor II
  REGION 160..391: note = misc_feature - human IgG1 Fc
MGRGLLRGLWPLHIVLWTRIASTIPPHVQKSVNNDMIVTDNNGAVKFPQLCKFCDVRFSTCDNQKSCMSNCSITSICEKPQEVCVAVWRKNDENITLETVCHDPKLPYHDFILEDAASPKCIMKEKKKPGETFFMCSCSSDECNDNIIFSEEYNTSNPDEPKSCDKTHTCPPCPAPELLGGPSVFLFPPKPKDTLMISRTPEVTCVVVDVSHEDPEVKFNWYVDGVEVHNAKTKPREEQYNSTYRVVSVLTVLHQDWLNGKEYKCKVSNKALPAPIEKTISKAKGQPREPQVYTLPPSRDELTKNQVSLTCLVKGFYPSDIAVEWESNGQPENNYKTTPPVLDSDGSFFLYSKLTVDKSRWQQGNVFSCSVMHEALHNHYTQKSLSLSPGK

SEQ ID NO: 438 - protein, 1273 aa, Severe acute respiratory syndrome coronavirus 2
  REGION 1..1273: note = SARS-CoV-2 Spike (S) Glycoprotein
MFVFLVLLPLVSSQCVNLTTRTQLPPAYTNSFTRGVYYPDKVFRSSVLHSTQDLFLPFFSNVTWFHAIHVSGTNGTKRFDNPVLPFNDGVYFASTEKSNIIRGWIFGTTLDSKTQSLLIVNNATNVVIKVCEFQFCNDPFLGVYYHKNNKSWMESEFRVYSSANNCTFEYVSQPFLMDLEGKQGNFKNLREFVFKNIDGYFKIYSKHTPINLVRDLPQGFSALEPLVDLPIGINITRFQTLLALHRSYLTPGDSSSGWTAGAAAYYVGYLQPRTFLLKYNENGTITDAVDCALDPLSETKCTLKSFTVEKGIYQTSNFRVQPTESIVRFPNITNLCPFGEVFNATRFASVYAWNRKRISNCVADYSVLYNSASFSTFKCYGVSPTKLNDLCFTNVYADSFVIRGDEVRQIAPGQTGKIADYNYKLPDDFTGCVIAWNSNNLDSKVGGNYNYLYRLFRKSNLKPFERDISTEIYQAGSTPCNGVEGFNCYFPLQSYGFQPTNGVGYQPYRVVVLSFELLHAPATVCGPKKSTNLVKNKCVNFNFNGLTGTGVLTESNKKFLPFQQFGRDIADTTDAVRDPQTLEILDITPCSFGGVSVITPGTNTSNQVAVLYQDVNCTEVPVAIHADQLTPTWRVYSTGSNVFQTRAGCLIGAEHVNNSYECDIPIGAGICASYQTQTNSPRRARSVASQSIIAYTMSLGAENSVAYSNNSIAIPTNFTISVTTEILPVSMTKTSVDCTMYICGDSTECSNLLLQYGSFCTQLNRALTGIAVEQDKNTQEVFAQVKQIYKTPPIKDFGGFNFSQILPDPSKPSKRSFIEDLLFNKVTLADAGFIKQYGDCLGDIAARDLICAQKFNGLTVLPPLLTDEMIAQYTSALLAGTITSGWTFGAGAALQIPFAMQMAYRFNGIGVTQNVLYENQKLIANQFNSAIGKIQDSLSSTASALGKLQDVVNQNAQALNTLVKQLSSNFGAISSVLNDILSRLDKVEAEVQIDRLITGRLQSLQTYVTQQLIRAAEIRASANLAATKMSECVLGQSKRVDFCGKGYHLMSFPQSAPHGVVFLHVTYVPAQEKNFTTAPAICHDGKAHFPREGVFVSNGTHWFVTQRNFYEPQIITTDNTFVSGNCDVVIGIVNNTVYDPLQPELDSFKEELDKYFKNHTSPDVDLGDISGINASVVNIQKEIDRLNEVAKNLNESLIDLQELGKYEQYIKWPWYIWLGFIAGLIAIVMVTIMLCCMTSCCSCLKGCCSCGSCCKFDEDDSEPVLKGVKLHYT

SEQ ID NO: 439 - DNA, 3822 bp, Severe acute respiratory syndrome coronavirus 2
  misc_feature 1..3822: note = SARS-CoV-2 glycoprotein
  source 1..3822: mol_type = genomic DNA
atgtttgtttttcttgttttattgccactagtctctagtcagtgtgttaatcttacaaccagaactcaattaccccctgcatacactaattctttcacacgtggtgtttattaccctgacaaagttttcagatcctcagttttacattcaactcaggacttgttcttacctttcttttccaatgttacttggttccatgctatacatgtctctgggaccaatggtactaagaggtttgataaccctgtcctaccatttaatgatggtgtttattttgcttccactgagaagtctaacataataagaggctggatttttggtactactttagattcgaagacccagtccctacttattgttaataacgctactaatgttgttattaaagtctgtgaatttcaattttgtaatgatccatttttgggtgtttattaccacaaaaacaacaaaagttggatggaaagtgagttcagagtttattctagtgcgaataattgcacttttgaatatgtctctcagccttttcttatggaccttgaaggaaaacagggtaatttcaaaaatcttagggaatttgtgtttaagaatattgatggttattttaaaatatattctaagcacacgcctattaatttagtgcgtgatctccctcagggtttttcggctttagaaccattggtagatttgccaataggtattaacatcactaggtttcaaactttacttgctttacatagaagttatttgactcctggtgattcttcttcaggttggacagctggtgctgcagcttattatgtgggttatcttcaacctaggacttttctattaaaatataatgaaaatggaaccattacagatgctgtagactgtgcacttgaccctctctcagaaacaaagtgtacgttgaaatccttcactgtagaaaaaggaatctatcaaacttctaactttagagtccaaccaacagaatctattgttagatttcctaatattacaaacttgtgcccttttggtgaagtttttaacgccaccagatttgcatctgtttatgcttggaacaggaagagaatcagcaactgtgttgctgattattctgtcctatataattccgcatcattttccacttttaagtgttatggagtgtctcctactaaattaaatgatctctgctttactaatgtctatgcagattcatttgtaattagaggtgatgaagtcagacaaatcgctccagggcaaactggaaagattgctgattataattataaattaccagatgattttacaggctgcgttatagcttggaattctaacaatcttgattctaaggttggtggtaattataattacctgtatagattgtttaggaagtctaatctcaaaccttttgagagagatatttcaactgaaatctatcaggccggtagcacaccttgtaatggtgttgaaggttttaattgttactttcctttacaatcatatggtttccaacccactaatggtgttggttaccaaccatacagagtagtagtactttcttttgaacttctacatgcaccagcaactgtttgtggacctaaaaagtctactaatttggttaaaaacaaatgtgtcaatttcaacttcaatggtttaacaggcacaggtgttcttactgagtctaacaaaaagtttctgcctttccaacaatttggcagagacattgctgacactactgatgctgtccgtgatccacagacacttgagattcttgacattacaccatgttcttttggtggtgtcagtgttataacaccaggaacaaatacttctaaccaggttgctgttctttatcaggatgttaactgcacagaagtccctgttgctattcatgcagatcaacttactcctacttggcgtgtttattctacaggttctaatgtttttcaaacacgtgcaggctgtttaataggggctgaacatgtcaacaactcatatgagtgtgacatacccattggtgcaggtatatgcgctagttatcagactcagactaattctcctcggcgggcacgtagtgtagctagtcaatccatcattgcctacactatgtcacttggtgcagaaaattcagttgcttactctaataactctattgccatacccacaaattttactattagtgttaccacagaaattctaccagtgtctatgaccaagacatcagtagattgtacaatgtacatttgtggtgattcaactgaatgcagcaatcttttgttgcaatatggcagtttttgtacacaattaaaccgtgctttaactggaatagctgttgaacaagacaaaaacacccaagaagtttttgcacaagtcaaacaaatttacaaaacaccaccaattaaagattttggtggttttaatttttcacaaatattaccagatccatcaaaaccaagcaagaggtcatttattgaagatctacttttcaacaaagtgacacttgcagatgctggcttcatcaaacaatatggtgattgccttggtgatattgctgctagagacctcatttgtgcacaaaagtttaacggccttactgttttgccacctttgctcacagatgaaatgattgctcaatacacttctgcactgttagcgggtacaatcacttctggttggacctttggtgcaggtgctgcattacaaataccatttgctatgcaaatggcttataggtttaatggtattggagttacacagaatgttctctatgagaaccaaaaattgattgccaaccaatttaatagtgctattggcaaaattcaagactcactttcttccacagcaagtgcacttggaaaacttcaagatgtggtcaaccaaaatgcacaagctttaaacacgcttgttaaacaacttagctccaattttggtgcaatttcaagtgttttaaatgatatcctttcacgtcttgacaaagttgaggctgaagtgcaaattgataggttgatcacaggcagacttcaaagtttgcagacatatgtgactcaacaattaattagagctgcagaaatcagagcttctgctaatcttgctgctactaaaatgtcagagtgtgtacttggacaatcaaaaagagttgatttttgtggaaagggctatcatcttatgtccttccctcagtcagcacctcatggtgtagtcttcttgcatgtgacttatgtccctgcacaagaaaagaacttcacaactgctcctgccatttgtcatgatggaaaagcacactttcctcgtgaaggtgtctttgtttcaaatggcacacactggtttgtaacacaaaggaatttttatgaaccacaaatcattactacagacaacacatttgtgtctggtaactgtgatgttgtaataggaattgtcaacaacacagtttatgatcctttgcaacctgaattagactcattcaaggaggagttagataaatattttaagaatcatacatcaccagatgttgatttaggtgacatctctggcattaatgcttcagttgtaaacattcaaaaagaaattgaccgcctcaatgaggttgccaagaatttaaatgaatctctcatcgatctccaagaacttggaaagtatgagcagtatataaaatggccatggtacatttggctaggttttatagctggcttgattgccatagtaatggtgacaattatgctttgctgtatgaccagttgctgtagttgtctcaagggctgttgttcttgtggatcctgctgcaaatttgatgaagacgactctgagccagtgctcaaaggagtcaaattacattacacataa

SEQ ID NO: 440 - protein, 223 aa, synthetic construct
  REGION 1..223: note = Receptor Binding Domain (RBD) of SARS-CoV-2 SpikeProtein
RVQPTESIVRFPNITNLCPFGEVFNATRFASVYAWNRKRISNCVADYSVLYNSASFSTFKCYGVSPTKLNDLCFTNVYADSFVIRGDEVRQIAPGQTGKIADYNYKLPDDFTGCVIAWNSNNLDSKVGGNYNYLYRLFRKSNLKPFERDISTEIYQAGSTPCNGVEGFNCYFPLQSYGFQPTNGVGYQPYRVVVLSFELLHAPATVCGPKKSTNLVKNKCVNF

SEQ ID NO: 441 - protein, 38 aa, synthetic construct
  REGION 1..38: note = Portion of SARS-CoV-2 Spike Protein ReceptorBinding Domain (RBD)
CYFPLQSYGFQPTNGVGYQPYRVVVLSFELLHAPATVC

SEQ ID NO: 442 - protein, 991 aa, Porphyromonas gingivalis
  REGION 1..991: note = Gingipain R1 (Arginine-gingipain A or RgpA; UniProt Accession No.: P28784)
MKNLNKFVSIALCSSLLGGMAFAQQTELGRNPNVRLLESTQQSVTKVQFRMDNLKFTEVQTPKGMAQVPTYTEGVNLSEKGMPTLPILSRSLAVSDTREMKVEVVSSKFIEKKNVLIAPSKGMIMRNEDPKKIPYVYGKSYSQNKFFPGEIATLDDPFILRDVRGQVVNFAPLQYNPVTKTLRIYTEITVAVSETSEQGKNILNKKGTFAGFEDTYKRMFMNYEPGRYTPVEEKQNGRMIVIVAKKYEGDIKDFVDWKNQRGLRTEVKVAEDIASPVTANAIQQFVKQEYEKEGNDLTYVLLVGDHKDIPAKITPGIKSDQVYGQIVGNDHYNEVFIGRFSCESKEDLKTQIDRTIHYERNITTEDKWLGQALCIASAEGGPSADNGESDIQHENVIANLLTQYGYTKIIKCYDPGVTPKNIIDAFNGGISLVNYTGHGSETAWGTSHFGTTHVKQLTNSNQLPFIFDVACVNGDFLFSMPCFAEALMRAQKDGKPTGTVAIIASTINQSWASPMRGQDEMNEILCEKHPNNIKRTFGGVTMNGMFAMVEKYKKDGEKMLDTWTVFGDPSLLVRTLVPTKMQVTAPAQINLTDASVNVSCDYNGAIATISANGKMFGSAVVENGTATINLTGLTNESTLTLTVVGYNKETVIKTINTNGEPNPYQPVSNLTATTQGQKVTLKWDAPSTKTNATTNTARSVDGIRELVLLSVSDAPELLRSGQAEIVLEAHDVWNDGSGYQILLDADHDQYGQVIPSDTHTLWPNCSVPANLFAPFEYTVPENADPSCSPTNMIMDGTASVNIPAGTYDFAIAAPQANAKIWIAGQGPTKEDDYVFEAGKKYHFLMKKMGSGDGTELTISEGGGSDYTYTVYRDGTKIKEGLTETTYRDAGMSAQSHEYCVEVKYAAGVSPKVCVDYIPDGVADVTAQKPYTLTVVGKTITVTCQGEAMIYDMNGRRLAAGRNTVVYTAQGGYYAVMVVVDGKSYVEKLAVK

SEQ ID NO: 443 - protein, 736 aa, Porphyromonas gingivalis
  REGION 1..736: note = Gingipain R2 (Arginine-gingipain B or RgpB; UniProt Accession No.: P95493)
MKKNFSRIVSIVAFSSLLGGMAFAQPAERGRNPQVRLLSAEQSMSKVQFRMDNLQFTGVQTSKGVAQVPTFTEGVNISEKGTPILPILSRSLAVSETRAMKVEVVSSKFIEKKDVLIAPSKGVISRAENPDQIPYVYGQSYNEDKFFPGEIATLSDPFILRDVRGQVVNFAPLQYNPVTKTLRIYTEIVVAVSETAEAGQNTISLVKNSTFTGFEDIYKSVFMNYEATRYTPVEEKENGRMIVIVPKKYEEDIEDFVDWKNQRGLRTEVKVAEDIASPVTANAIQQFVKQEYEKEGNDLTYVLLVGDHKDIPAKITPGIKSDQVYGQIVGNDHYNEVFIGRFSCESKEDLKTQIDRTIHYERNITTEDKWLGQALCIASAEGGPSADNGESDIQHENIIANLLTQYGYTKIIKCYDPGVTPKNIIDAFNGGISLANYTGHGSETAWGTSHFGTTHVKQLTNSNQLPFIFDVACVNGDFLYNVPCFAEALMRAQKDGKPTGTVAIIASTINQSWASPMRGQDEMNEILCEKHPNNIKRTFGGVTMNGMFAMVEKYKKDGEKMLDTWTVFGDPSLLVRTLVPTKMQVTAPANISASAQTFEVACDYNGAIATLSDDGDMVGTAIVKDGKAIIKLNESIADETNLTLTVVGYNKVTVIKDVKVEGTSIADVANDKPYTVAVSGKTITVESPAAGLTIFDMNGRRVATAKNRMVFEAQNGVYAVRIATEGKTYTEKVIVK

SEQ ID NO: 444 - protein, 1723 aa, Porphyromonas gingivalis
  REGION 1..1723: note = Lysine-gingipain (Kgp) fromPorphyromonasgingivalis strain ATCC 33277 (UniProt AccessionNo. B2RLK2
MRKLLLLIAASLLGVGLYAQSAKIKLDAPTTRTTCTNNSFKQFDASFSFNEVELTKVETKGGTFASVSIPGAFPTGEVGSPEVPAVRKLIAVPVGATPVVRVKSFTEQVYSLNQYGSEKLMPHQPSMSKSDDPEKVPFVYNAAAYARKGFVGQELTQVEMLGTMRGVRIAALTINPVQYDVVANQLKVRNNIEIEVSFQGADEVATQRLYDASFSPYFETAYKQLFNRDVYTDHGDLYNTPVRMLVVAGAKFKEALKPWLTWKAQKGFYLDVHYTDEAEVGTTNASIKAFIHKKYNDGLAASAAPVFLALVGDTDVISGEKGKKTKKVTDLYYSAVDGDYFPEMYTFRMSASSPEELTNIIDKVLMYEKATMPDKSYLEKALLIAGADSYWNPKIGQQTIKYAVQYYYNQDHGYTDVYSYPKAPYTGCYSHLNTGVGFANYTAHGSETSWADPSLTATQVKALTNKDKYFLAIGNCCVTAQFDYPQPCFGEVMTRVKEKGAYAYIGSSPNSYWGEDYYWSVGANAVFGVQPTFEGTSMGSYDATFLEDSYNTVNSIMWAGNLAATHAGNIGNITHIGAHYYWEAYHVLGDGSVMPYRAMPKTNTYTLPASLPQNQASYSIQASAGSYVAISKDGVLYGTGVANASGVATVNMTKQITENGNYDVVITRSNYLPVIKQIQAGEPSPYQPVSNLTATTQGQKVTLKWDAPSAKKAEASREVKRIGDGLFVTIEPANDVRANEAKVVLAADNVWGDNTGYQFLLDADHNTFGSVIPATGPLFTGTASSNLYSANFEYLIPANADPVVTTQNIIVTGQGEVVIPGGVYDYCITNPEPASGKMWIAGDGGNQPARYDDFTFEAGKKYTFTMRRAGMGDGTDMEVEDDSPASYTYTVYRDGTKIQEGLTATTFEEDGVAAGNHEYCVEVKYTAGVSPKVCKDVTVEGSNEFAPVQNLTGSAVGQKVTLKWDAPNGTPNPNPNPNPGTTTLSESFENGIPASWKTIDADGDGHGWKPGNAPGIAGYNSNGCVYSESFGLGGIGVLTPDNYLITPALDLPNGGKLTFWVCAQDANYASEHYAVYASSTGNDASNFTNALLEETITAKGVRSPEAIRGRIQGTWRQKTVDLPAGTKYVAFRHFQSTDMFYIDLDEVEIKANGKRADFTETFESSTHGEAPAEWTTIDADGDGQDWLCLSSGQLDWLTAHGGTNVVASFSWNGMALNPDNYLISKDVTGATKVKYYYAVNDGFPGDHYAVMISKTGTNAGDFTVVFEETPNGINKGGARFGLSTEANGAKPQSVWIERTVDLPAGTKYVAFRHYNCSDLNYILLDDIQFTMGGSPTPTDYTYTVYRDGTKIKEGLTETTFEEDGVATGNHEYCVEVKYTAGVSPKVCVNVTINPTQFNPVKNLKAQPDGGDVVLKWEAPSGKRGELLNEDFEGDAIPTGWTALDADGDGNNWDITLNEFTRGERHVLSPLRASNVAISYSSLLQGQEYLPLTPNNFLITPKVEGAKKITYKVGSPGLPQWSHDHYALCISKSGTAAADFEVIFEETMTYTQGGANLTREKDLPAGTKYVAFRHYNCTDVLGIMIDDVVITGEGEGPSYTYTVYRDGTKIQEGLTETTYRDAGMSAQSHEYCVEVKYAAGVSPKVCVDYIPDGVADVTAQKPYTLTVVGKTITVTCQGEAMIYDMNGRRLAAGRNTVVYTAQGGYYAVMVVVDGKSYVEKLAIK

SEQ ID NO: 445 - protein, 1732 aa, Porphyromonas gingivalis
  REGION 1..1732: note = Lysine-gingipain W83 (UniProt Accession No.:Q51817)
MRKLLLLIAASLLGVGLYAQSAKIKLDAPTTRTTCTNNSFKQFDASFSFNEVELTKVETKGGTFASVSIPGAFPTGEVGSPEVPAVRKLIAVPVGATPVVRVKSFTEQVYSLNQYGSEKLMPHQPSMSKSDDPEKVPFVYNAAAYARKGFVGQELTQVEMLGTMRGVRIAALTINPVQYDVVANQLKVRNNIEIEVSFQGADEVATQRLYDASFSPYFETAYKQLFNRDVYTDHGDLYNTPVRMLVVAGAKFKEALKPWLTWKAQKGFYLDVHYTDEAEVGTTNASIKAFIHKKYNDGLAASAAPVFLALVGDTDVISGEKGKKTKKVTDLYYSAVDGDYFPEMYTFRMSASSPEELTNIIDKVLMYEKATMPDKSYLEKVLLIAGADYSWNSQVGQPTIKYGMQYYYNQEHGYTDVYNYLKAPYTGCYSHLNTGVSFANYTAHGSETAWADPLLTTSQLKALTNKDKYFLAIGNCCITAQFDYVQPCFGEVITRVKEKGAYAYIGSSPNSYWGEDYYWSVGANAVFGVQPTFEGTSMGSYDATFLEDSYNTVNSIMWAGNLAATHAGNIGNITHIGAHYYWEAYHVLGDGSVMPYRAMPKTNTYTLPASLPQNQASYSIQASAGSYVAISKDGVLYGTGVANASGVATVSMTKQITENGNYDVVITRSNYLPVIKQIQVGEPSPYQPVSNLTATTQGQKVTLKWEAPSAKKAEGSREVKRIGDGLFVTIEPANDVRANEAKVVLAADNVWGDNTGYQFLLDADHNTFGSVIPATGPLFTGTASSNLYSANFEYLVPANADPVVTTQNIIVTGQGEVVIPGGVYDYCITNPEPASGKMWIAGDGGNQPARYDDFTFEAGKKYTFTMRRAGMGDGTDMEVEDDSPASYTYTVYRDGTKIKEGLTATTFEEDGVAAGNHEYCVEVKYTAGVSPKVCKDVTVEGSNEFAPVQNLTGSSVGQKVTLKWDAPNGTPNPNPNPNPNPGTTLSESFENGIPASWKTIDADGDGHGWKPGNAPGIAGYNSNGCVYSESFGLGGIGVLTPDNYLITPALDLPNGGKLTFWVCAQDANYASEHYAVYASSTGNDASNFTNALLEETITAKGVRSPKAIRGRIQGTWRQKTVDLPAGTKYVAFRHFQSTDMFYIDLDEVEIKANGKRADFTETFESSTHGEAPAEWTTIDADGDGQGWLCLSSGQLDWLTAHGGSNVVSSFSWNGMALNPDNYLISKDVTGATKVKYYYAVNDGFPGDHYAVMISKTGTNAGDFTVVFEETPNGINKGGARFGLSTEANGAKPQSVWIERTVDLPAGTKYVAFRHYNCSDLNYILLDDIQFTMGGSPTPTDYTYTVYRDGTKIKEGLTETTFEEDGVATGNHEYCVEVKYTAGVSPKKCVDVTVNSTQFNPVQNLTAEQAPNSMDAILKWNAPASKRAEVLNEDFENGIPASWKTIDADGDGNNWTTTPPPGGSSFAGHNSAICVSSASHINFEGPQNPDNYLVTPELSLPGGGTLTFWVCAQDANYASEHYAVYASSTGNDASNFANALLEEVLTAKTVVTAPEAIRGTRAQGTWYQKTVQLPAGTKYVAFRHFGCTDFFWINLDDVVITSGNAPSYTYTIYRNNTQIASGVTETTYRDPDLATGFYTYGVKVVYPNGESAIETATLNITSLADVTAQKPYTLTVVGKTITVTCQGEAMIYDMNGRRLAAGRNTVVYTAQGGHYAVMVVVDGKSYVEKLAVK

SEQ ID NO: 446 - protein, 1723 aa, Porphyromonas gingivalis; identical to SEQ ID NO: 444
  REGION 1..1723: note = Lysine-gingipain 381 (UniProt Accession No.:P72194)

SEQ ID NO: 447 - protein, 1723 aa, Porphyromonas gingivalis
  REGION 1..1723: note = Lysine-gingipain HG66 (UniProt Accession No.:P72197)
MRKLLLLIAASLLGVGLYAQNAKIKLDAPTTRTTCTNNSFKQFDASFSFNEVELTKVETKGGTFASVSIPGAFPTGEVGSPEVPAVRKLIAVPVGATPVVRVKSFTEQVYSLNQYGSEKLMPHQPSMSKSDDPEKVPFAYNAAAYARKGFVGQELTQVEMLGTMRGVRIAALTINPVQYDVVANQLKVRNNIEIEVSFQGADEVATQRLYDASFSPYFETAYKQLFNRDVYTDHGDLYNTPVRMLVVAGAKFKEALKPWLTWKAQKGFYLDVHYTDEAEVGTTNASIKAFIHKKYNDGLAASAAPVFLALVGDTDVISGEKGKKTKKVTDLYYSAVDGDYFPEMYTFRMSASSPEELTNIIDKVLMYEKATMPDKSYLEKALLIAGADSYWNPKIGQQTIKYAVQYYYNQDHGYTDVYSYPKAPYTGCYSHLNTGVGFANYTAHGSETSWADPSVTATQVKALTNKNKYFLAIGNCCVTAQFDYPQPCFGEVMTRVKEKGAYAYIGSSPNSYWGEDYYWSVGANAVFGVQPTFEGTSMGSYDATFLEDSYNTVNSIMWAGNLAATHAENIGNVTHIGAHYYWEAYHVLGDGSVMPYRAMPKTNTYTLPASLPQNQASYSIQASAGSYVAISKDGVLYGTGVANASGVATVNMTKQITENGNYDVVITRSNYLPVIKQIQAGEPSPYQPVSNLTATTQGQKVTLKWDAPSAKKAEGSREVKRIGDGLFVTIEPANDVRANEAKVVLAADNVWGDNTGYQFLLDADHNTFGSVIPATGPLFTGTASSNLYSANFEYLIPANADPVVTTQNIIVTGQGEVVIPGGVYDYCITNPEPASGKMWIAGDGGNQPARYDDFTFEAGKKYTFTMRRAGMGDGTDMEVEDDSPASYTYTVYRDGTKIKEGLTATTFEEDGVAAGNHEYCVEVKYTAGVSPKVCKDVTVEGSNEFAPVQNLTGSAVGQKVTLKWDAPNGTPNPNPNPNPGTTTLSESFENGIPASWKTIDADGDGHGWKPGNAPGIAGYNSNGCVYSESFGLGGIGVLTPDNYLITPALDLPNGGKLTFWVCAQDANYASEHYAVYASSTGNDASNFTNALLEETITAKGVRSPEAIRGRIQGTWRQKTVDLPAGTKYVAFRHFQSTDMFYIDLDEVEIKANGKRADFTETFESSTHGEAPAEWTTIDADGDGQGWLCLSSGQLDWLTAHGGTNVVASFSWNGMALNPDNYLISKDVTGATKVKYYYAVNDGFPGDHYAVMISKTGTNAGDFTVVFEETPNGINKGGARFGLSTEADGAKPQSVWIERTVDLPAGTKYVAFRHYNCSDLNYILLDDIQFTMGGSPTPTDYTYTVYRDGTKIKEGLTETTFEEDGVATGNHEYCVEVKYTAGVSPKKCVNVTINPTQFNPVKNLKAQPDGGDVVLKWEAPSAKKAEGSREVKRIGDGLFVTIEPANDVRANEAKVVLAADNVWGDNTGYQFLLDADHNTFGSVIPATGPLFTGTASSNLYSANFEYLIPANADPVVTTQNIIVTGQGEVVIPGGVYDYCITNPEPASGKMWIAGDGGNQPARYDDFTFEAGKKYTFTMRRAGMGDGTDMEVEDDSPASYTYTVYRDGTKIKEGLTETTYRDAGMSAQSHEYCVEVKYAAGVSPKVCVDYIPDGVADVTAQKPYTLTVVGKTITVTCQGEAMIYDMNGRRLAAGRNTVVYTAQGGYYAVMVVVDGKSYVEKLAVK

SEQ ID NO: 448 - DNA, 828 bp, Severe acute respiratory syndrome coronavirus 2
  misc_feature 1..828: note = ORF3a
  source 1..828: mol_type = genomic DNA
atggatttgtttatgagaatcttcacaattggaactgtaactttgaagcaaggtgaaatcaaggatgctactccttcagattttgttcgcgctactgcaacgataccgatacaagcctcactccctttcggatggcttattgttggcgttgcacttcttgctgtttttcagagcgcttccaaaatcataaccctcaaaaagagatggcaactagcactctccaagggtgttcactttgtttgcaacttgctgttgttgtttgtaacagtttactcacaccttttgctcgttgctgctggccttgaagccccttttctctatctttatgctttagtctacttcttgcagagtataaactttgtaagaataataatgaggctttggctttgctggaaatgccgttccaaaaacccattactttatgatgccaactattttctttgctggcatactaattgttacgactattgtataccttacaatagtgtaacttcttcaattgtcattacttcaggtgatggcacaacaagtcctatttctgaacatgactaccagattggtggttatactgaaaaatgggaatctggagtaaaagactgtgttgtattacacagttacttcacttcagactattaccagctgtactcaactcaattgagtacagacactggtgttgaacatgttaccttcttcatctacaataaaattgttgatgagcctgaagaacatgtccaaattcacacaatcgacggttcatccggagttgttaatccagtaatggaaccaatttatgatgaaccgacgacgactactagcgtgcctttgtaa

SEQ ID NO: 449 - protein, 275 aa, Severe acute respiratory syndrome coronavirus 2
  REGION 1..275: note = ORF3a
MDLFMRIFTIGTVTLKQGEIKDATPSDFVRATATIPIQASLPFGWLIVGVALLAVFQSASKIITLKKRWQLALSKGVHFVCNLLLLFVTVYSHLLLVAAGLEAPFLYLYALVYFLQSINFVRIIMRLWLCWKCRSKNPLLYDANYFLCWHTNCYDYCIPYNSVTSSIVITSGDGTTSPISEHDYQIGGYTEKWESGVKDCVVLHSYFTSDYYQLYSTQLSTDTGVEHVTFFIYNKIVDEPEEHVQIHTIDGSSGVVNPVMEPIYDEPTTTTSVPL

SEQ ID NO: 450 - DNA, 228 bp, Severe acute respiratory syndrome coronavirus 2
  misc_feature 1..228: note = Envelope (E)
  source 1..228: mol_type = genomic DNA
atgtactcattcgtttcggaagagacaggtacgttaatagttaatagcgtacttctttttcttgctttcgtggtattcttgctagttacactagccatccttactgcgcttcgattgtgtgcgtactgctgcaatattgttaacgtgagtcttgtaaaaccttctttttacgtttactctcgtgttaaaaatctgaattcttctagagttcctgatcttctggtctaa

SEQ ID NO: 451 - protein, 75 aa, Severe acute respiratory syndrome coronavirus 2
  REGION 1..75: note = Envelope (E)
MYSFVSEETGTLIVNSVLLFLAFVVFLLVTLAILTALRLCAYCCNIVNVSLVKPSFYVYSRVKNLNSSRVPDLLV

SEQ ID NO: 452 - DNA, 669 bp, Severe acute respiratory syndrome coronavirus 2
  misc_feature 1..669: note = Membrane (M)
  source 1..669: mol_type = genomic DNA
atggcagattccaacggtactattaccgttgaagagcttaaaaagctccttgaacaatggaacctagtaataggtttcctattccttacatggatttgtcttctacaatttgcctatgccaacaggaataggtttttgtatataattaagttaattttcctctggctgttatggccagtaactttagcttgttttgtgcttgctgctgtttacagaataaattggatcaccggtggaattgctatcgcaatggcttgtcttgtaggcttgatgtggctcagctacttcattgcttctttcagactgtttgcgcgtacgcgttccatgtggtcattcaatccagaaactaacattcttctcaacgtgccactccatggcactattctgaccagaccgcttctagaaagtgaactcgtaatcggagctgtgatccttcgtggacatcttcgtattgctggacaccatctaggacgctgtgacatcaaggacctgcctaaagaaatcactgttgctacatcacgaacgctttcttattacaaattgggagcttcgcagcgtgtagcaggtgactcaggttttgctgcatacagtcgctacaggattggcaactataaattaaacacagaccattccagtagcagtgacaatattgctttgcttgtacagtaa

SEQ ID NO: 453 - protein, 222 aa, Severe acute respiratory syndrome coronavirus 2
  REGION 1..222: note = Membrane (M)
MADSNGTITVEELKKLLEQWNLVIGFLFLTWICLLQFAYANRNRFLYIIKLIFLWLLWPVTLACFVLAAVYRINWITGGIAIAMACLVGLMWLSYFIASFRLFARTRSMWSFNPETNILLNVPLHGTILTRPLLESELVIGAVILRGHLRIAGHHLGRCDIKDLPKEITVATSRTLSYYKLGASQRVAGDSGFAAYSRYRIGNYKLNTDHSSSSDNIALLVQ

SEQ ID NO: 454 - DNA, 186 bp, Severe acute respiratory syndrome coronavirus 2
  misc_feature 1..186: note = ORF6
  source 1..186: mol_type = genomic DNA
atgtttcatctcgttgactttcaggttactatagcagagatattactaattattatgaggacttttaaagtttccatttggaatcttgattacatcataaacctcataattaaaaatttatctaagtcactaactgagaataaatattctcaattagatgaagagcaaccaatggagattgattaa

SEQ ID NO: 455 - protein, 61 aa, Severe acute respiratory syndrome coronavirus 2
  REGION 1..61: note = ORF6
MFHLVDFQVTIAEILLIIMRTFKVSIWNLDYIINLIIKNLSKSLTENKYSQLDEEQPMEID

SEQ ID NO: 456 - DNA, 366 bp, Severe acute respiratory syndrome coronavirus 2
  misc_feature 1..366: note = ORF7a
  source 1..366: mol_type = genomic DNA
atgaaaattattcttttcttggcactgataacactcgctacttgtgagctttatcactaccaagagtgtgttagaggtacaacagtacttttaaaagaaccttgctcttctggaacatacgagggcaattcaccatttcatcctctagctgataacaaatttgcactgacttgctttagcactcaatttgcttttgcttgtcctgacggcgtaaaacacgtctatcagttacgtgccagatcagtttcacctaaactgttcatcagacaagaggaagttcaagaactttactctccaatttttcttattgttgcggcaatagtgtttataacactttgcttcacactcaaaagaaagacagaatga

SEQ ID NO: 457 - protein, 121 aa, Severe acute respiratory syndrome coronavirus 2
  REGION 1..121: note = ORF7a
MKIILFLALITLATCELYHYQECVRGTTVLLKEPCSSGTYEGNSPFHPLADNKFALTCFSTQFAFACPDGVKHVYQLRARSVSPKLFIRQEEVQELYSPIFLIVAAIVFITLCFTLKRKTE

SEQ ID NO: 458 - DNA, 132 bp, Severe acute respiratory syndrome coronavirus 2
  misc_feature 1..132: note = ORF7b
  source 1..132: mol_type = genomic DNA
atgattgaactttcattaattgacttctatttgtgctttttagcctttctgctattccttgttttaattatgcttattatcttttggttctcacttgaactgcaagatcataatgaaacttgtcacgcctaa

SEQ ID NO: 459 - protein, 43 aa, Severe acute respiratory syndrome coronavirus 2
  REGION 1..43: note = ORF7b
MIELSLIDFYLCFLAFLLFLVLIMLIIFWFSLELQDHNETCHA

SEQ ID NO: 460 - DNA, 366 bp, Severe acute respiratory syndrome coronavirus 2
  misc_feature 1..366: note = ORF8
  source 1..366: mol_type = genomic DNA
atgaaatttcttgttttcttaggaatcatcacaactgtagctgcatttcaccaagaatgtagtttacagtcatgtactcaacatcaaccatatgtagttgatgacccgtgtcctattcacttctattctaaatggtatattagagtaggagctagaaaatcagcacctttaattgaattgtgcgtggatgaggctggttctaaatcacccattcagtacatcgatatcggtaattatacagtttcctgtttaccttttacaattaattgccaggaacctaaattgggtagtcttgtagtgcgttgttcgttctatgaagactttttagagtatcatgacgttcgtgttgttttagatttcatctaa

SEQ ID NO: 461 - protein, 121 aa, Severe acute respiratory syndrome coronavirus 2
  REGION 1..121: note = ORF8
MKFLVFLGIITTVAAFHQECSLQSCTQHQPYVVDDPCPIHFYSKWYIRVGARKSAPLIELCVDEAGSKSPIQYIDIGNYTVSCLPFTINCQEPKLGSLVVRCSFYEDFLEYHDVRVVLDFI

SEQ ID NO: 462 - DNA, 1260 bp, Severe acute respiratory syndrome coronavirus 2
  misc_feature 1..1260: note = Nucleocapsid (N)
  source 1..1260: mol_type = genomic DNA
atgtctgataatggaccccaaaatcagcgaaatgcaccccgcattacgtttggtggaccctcagattcaactggcagtaaccagaatggagaacgcagtggggcgcgatcaaaacaacgtcggccccaaggtttacccaataatactgcgtcttggttcaccgctctcactcaacatggcaaggaagaccttaaattccctcgaggacaaggcgttccaattaacaccaatagcagtccagatgaccaaattggctactaccgaagagctaccagacgaattcgtggtggtgacggtaaaatgaaagatctcagtccaagatggtatttctactacctaggaactgggccagaagctggacttccctatggtgctaacaaagacggcatcatatgggttgcaactgagggagccttgaatacaccaaaagatcacattggcacccgcaatcctgctaacaatgctgcaatcgtgctacaacttcctcaaggaacaacattgccaaaaggcttctacgcagaagggagcagaggcggcagtcaagcctcttctcgttcctcatcacgtagtcgcaacagttcaagaaattcaactccaggcagcagtaggggaacttctcctgctagaatggctggcaatggcggtgatgctgctcttgctttgctgctgcttgacagattgaaccagcttgagagcaaaatgtctggtaaaggccaacaacaacaaggccaaactgtcactaagaaatctgctgctgaggcttctaagaagcctcggcaaaaacgtactgccactaaagcatacaatgtaacacaagctttcggcagacgtggtccagaacaaacccaaggaaattttggggaccaggaactaatcagacaaggaactgattacaaacattggccgcaaattgcacaatttgcccccagcgcttcagcgttcttcggaatgtcgcgcattggcatggaagtcacaccttcgggaacgtggttgacctacacaggtgccatcaaattggatgacaaagatccaaatttcaaagatcaagtcattttgctgaataagcatattgacgcatacaaaacattcccaccaacagagcctaaaaaggacaaaaagaagaaggctgatgaaactcaagccttaccgcagagacagaagaaacagcaaactgtgactcttcttcctgctgcagatttggatgatttctccaaacaattgcaacaatccatgagcagtgctgactcaactcaggcctaa

SEQ ID NO: 463 - protein, 419 aa, Severe acute respiratory syndrome coronavirus 2
  REGION 1..419: note = Nucleocapsid (N)
MSDNGPQNQRNAPRITFGGPSDSTGSNQNGERSGARSKQRRPQGLPNNTASWFTALTQHGKEDLKFPRGQGVPINTNSSPDDQIGYYRRATRRIRGGDGKMKDLSPRWYFYYLGTGPEAGLPYGANKDGIIWVATEGALNTPKDHIGTRNPANNAAIVLQLPQGTTLPKGFYAEGSRGGSQASSRSSSRSRNSSRNSTPGSSRGTSPARMAGNGGDAALALLLLDRLNQLESKMSGKGQQQQGQTVTKKSAAEASKKPRQKRTATKAYNVTQAFGRRGPEQTQGNFGDQELIRQGTDYKHWPQIAQFAPSASAFFGMSRIGMEVTPSGTWLTYTGAIKLDDKDPNFKDQVILLNKHIDAYKTFPPTEPKKDKKKKADETQALPQRQKKQQTVTLLPAADLDDFSKQLQQSMSSADSTQA

SEQ ID NO: 464 - DNA, 803 bp, Salmonella enterica
  misc_feature 1..803: note = thyA gene
  source 1..803: mol_type = genomic DNA
gaggaaccatgaaacagtatttagaactgatgcaaaaagtgctggatgaaggcacacagaaaaacgaccgtaccggcaccggcacgctttccatttttggccatcagatgcgttttaacctgcaggaaggctttcctctggtgacgacgaaacgctgccatttacgttcaattattcacgaactgctatggtttttgcagggcgataccaacatcgcttacctgcacgaaaataatgtcaccatctgggacgaatgggccgatgagaacggcgatttaggcccggtttatggtaagcagtggcgtgcatggccaacaccggatggccgccatatcgatcagatcgccacggtcttaagccagcttaaaaacgacccggactctcgtcgtattatcgtttctgcgtggaacgtcggcgagctggataagatggcgctggcgccgtgtcacgcctttttccagttttatgtcgcagatggaaaactctcctgtcagctttatcagcgctcctgcgatgtgttcctcggtctgccgttcaacattgccagctacgcgttactggtgcatatgatggcgcaacagtgcgacctggacgtcggcgattttgtctggaccggcggcgacacgcacctgtacagcaaccatatggagcagacgcacctgcaattaagccgtgaaccgcgcgcgctgccgaaattggtcattaagcgtaaacccgattcgctttttgactaccggttcgatgatttcgaaattgaaggctatgatccgcaccccggtattaaagcgccggtcgctatctaa

SEQ ID NO: 465 - protein, 264 aa, Salmonella enterica
  REGION 1..264: note = thyA
MKQYLELMQKVLDEGTQKNDRTGTGTLSIFGHQMRFNLQEGFPLVTTKRCHLRSIIHELLWFLQGDTNIAYLHENNVTIWDEWADENGDLGPVYGKQWRAWPTPDGRHIDQIATVLSQLKNDPDSRRIIVSAWNVGELDKMALAPCHAFFQFYVADGKLSCQLYQRSCDVFLGLPFNIASYALLVHMMAQQCDLDVGDFVWTGGDTHLYSNHMEQTHLQLSREPRALPKLVIKRKPDSLFDYRFDDFEIEGYDPHPGIKAPVAI

SEQ ID NO: 466 - DNA, 1842 bp, synthetic construct
  misc_feature 1..1842: note = Mouse membrane bound IL-12p70
  misc_feature 1..1005: note = mouse IL-12p40
  misc_feature 1..66: note = IL-12p40 signal sequence
  misc_feature 1006..1050: note = (Gly4-Ser)3 Linker
  misc_feature 1051..1629: note = mouse IL-12p35 del1-22
  misc_feature 1630..1839: note = muB7 TM
  misc_feature 1630..1839: note = muCD80 (Isoform 1)
  source 1..1842: mol_type = other DNA
atgtgtcctcagaagctaaccatctcctggtttgccatcgttttgctggtgtctccactcatggccatgtgggagctggagaaagacgtttatgttgtagaggtggactggactcccgatgcccctggagaaacagtgaacctcacctgtgacacgcctgaagaagatgacatcacctggacctcagaccagagacatggagtcataggctctggaaagaccctgaccatcactgtcaaagagtttctagatgctggccagtacacctgccacaaaggaggcgagactctgagccactcacatctgctgctccacaagaaggaaaatggaatttggtccactgaaattttaaaaaatttcaaaaacaagactttcctgaagtgtgaagcaccaaattactccggacggttcacgtgctcatggctggtgcaaagaaacatggacttgaagttcaacatcaagagcagtagcagttcccctgactctcgggcagtgacatgtggaatggcgtctctgtctgcagagaaggtcacactggaccaaagggactatgagaagtattcagtgtcctgccaggaggatgtcacctgcccaactgccgaggagaccctgcccattgaactggcgttggaagcacggcagcagaataaatatgagaactacagcaccagcttcttcatcagggacatcatcaaaccagacccgcccaagaacttgcagatgaagcctttgaagaactcacaggtggaggtcagctgggagtaccctgactcctggagcactccccattcctacttctccctcaagttctttgttcgaatccagcgcaagaaagaaaagatgaaggagacagaggaggggtgtaaccagaaaggtgcgttcctcgtagagaagacatctaccgaagtccaatgcaaaggcgggaatgtctgcgtgcaagctcaggatcgctattacaattcctcatgcagcaagtgggcatgtgttccctgcagggtccgatccggtggcggtggctcgggcggtggtgggtcgggtggcggcggatctagggtcattccagtctctggacctgccaggtgtcttagccagtcccgaaacctgctgaagaccacagatgacatggtgaagacggccagagaaaaactgaaacattattcctgcactgctgaagacatcgatcatgaagacatcacacgggaccaaaccagcacattgaagacctgtttaccactggaactacacaagaacgagagttgcctggctactagagagacttcttccacaacaagagggagctgcctgcccccacagaagacgtctttgatgatgaccctgtgccttggtagcatctatgaggacttgaagatgtaccagacagagttccaggccatcaacgcagcacttcagaatcacaaccatcagcagatcattctagacaagggcatgctggtggccatcgatgagctgatgcagtctctgaatcataatggcgagactctgcgccagaaacctcctgtgggagaagcagacccttacagagtgaaaatgaagctctgcatcctgcttcacgccttcagcacccgcgtcgtgaccatcaacagggtgatgggctatctgagctccgcccccccagaagaccctcctgatagcaagaacacacttgtgctctttggggcaggattcggcgcagtaataacagtcgtcgtcatcgttgtcatcatcaaatgcttctgtaagcacagaagctgtttcagaagaaatgaggcaagcagagaaacaaacaacagccttaccttcgggcctgaagaagcattagctgaacagaccgtcttcctttag

SEQ ID NO: 467 - DNA, 1767 bp, synthetic construct
  misc_feature 1..1767: note = Human membrane bound IL-12p70
  misc_feature 1..984: note = huIL-12p40
  misc_feature 985..1029: note = (Gly4-Ser)3 Linker
  misc_feature 1030..1620: note = huIL-12p35 del1-22
  misc_feature 1621..1764: note = Hu CD80 (Isoform 1)
  source 1..1767: mol_type = other DNA
atgtgtcaccagcagttggtcatctcttggttttccctggtttttctggcatctcccctcgtggccatatgggaactgaagaaagatgtttatgtcgtagaattggattggtatccggatgcccctggagaaatggtggtcctcacctgtgacacccctgaagaagatggtatcacctggaccttggaccagagcagtgaggtcttaggctctggcaaaaccctgaccatccaagtcaaagagtttggagatgctggccagtacacctgtcacaaaggaggcgaggttctaagccattcgctcctgctgcttcacaaaaaggaagatggaatttggtccactgatattttaaaggaccagaaagaacccaaaaataagacctttctaagatgcgaggccaagaattattctggacgtttcacctgctggtggctgacgacaatcagtactgatttgacattcagtgtcaaaagcagcagaggctcttctgacccccaaggggtgacgtgcggagctgctacactctctgcagagagagtcagaggggacaacaaggagtatgagtactcagtggagtgccaggaggacagtgcctgcccagctgctgaggagagtctgcccattgaggtcatggtggatgccgttcacaagctcaagtatgaaaactacaccagcagcttcttcatcagggacatcatcaaacctgacccacccaagaacttgcagctgaagccattaaagaattctcggcaggtggaggtcagctgggagtaccctgacacctggagtactccacattcctacttctccctgacattctgcgttcaggtccagggcaagagcaagagagaaaagaaagatagagtcttcacggacaagacctcagccacggtcatctgccgcaaaaatgccagcattagcgtgcgggcccaggaccgctactatagctcatcttggagcgaatgggcatctgtgccctgcagtggtggcggtggctcgggcggtggtgggtcgggtggcggcggatctagaaacctccccgtggccactccagacccaggaatgttcccatgccttcaccactcccaaaacctgctgagggccgtcagcaacatgctccagaaggccagacaaactctagaattttacccttgcacttctgaagagattgatcatgaagatatcacaaaagataaaaccagcacagtggaggcctgtttaccattggaattaaccaagaatgagagttgcctaaattccagagagacctctttcataactaatgggagttgcctggcctccagaaagacctcttttatgatggccctgtgccttagtagtatttatgaagacttgaagatgtaccaggtggagttcaagaccatgaatgcaaagcttctgatggatcctaagaggcagatctttctagatcaaaacatgctggcagttattgatgagctgatgcaggccctgaatttcaacagtgagactgtgccacaaaaatcctcccttgaagaaccggatttttataaaactaaaatcaagctctgcatacttcttcatgctttcagaattcgggcagtgactattgatagagtgatgagctatctgaatgcttccgataacctgctcccatcctgggccattaccttaatctcagtaaatggaatttttgtgatatgctgcctgacctactgctttgccccaagatgcagagagagaaggaggaatgagagattgagaagggaaagtgtacgccctgtataa

SEQ ID NO: 468 - DNA, 1284 bp, synthetic construct
  misc_feature 1..1284: note = human IRF3 S396D
  source 1..1284: mol_type = other DNA
atgggaaccccaaagccacggattctgccctggctggtgtcgcagctggacctggggcaactggagggcgtggcctgggtgaacaagagccgcacgcgcttccgcatcccttggaagcacggcctacggcaggatgcacagcaggaggatttcggaatcttccaggcctgggccgaggccactggtgcatatgttcccgggagggataagccagacctgccaacctggaagaggaatttccgctctgccctcaaccgcaaagaagggttgcgtttagcagaggaccggagcaaggaccctcacgacccacataaaatctacgagtttgtgaactcaggagttggggacttttcccagccagacacctctccggacaccaatggtggaggcagtacttctgatacccaggaagacattctggatgagttactgggtaacatggtgttggccccactcccagatccgggacccccaagcctggctgtagcccctgagccctgccctcagcccctgcggagccccagcttggacaatcccactcccttcccaaacctggggccctctgagaacccactgaagcggctgttggtgccgggggaagagtgggagttcgaggtgacagccttctaccggggccgccaagtcttccagcagaccatctcctgcccggagggcctgcggctggtggggtccgaagtgggagacaggacgctgcctggatggccagtcacactgccagaccctggcatgtccctgacagacaggggagtgatgagctacgtgaggcatgtgctgagctgcctgggtgggggactggctctctggcgggccgggcagtggctctgggcccagcggctggggcactgccacacatactgggcagtgagcgaggagctgctccccaacagcgggcatgggcctgatggcgaggtccccaaggacaaggaaggaggcgtgtttgacctggggcccttcattgtagatctgattaccttcacggaaggaagcggacgctcaccacgctatgccctctggttctgtgtgggggagtcatggccccaggaccagccgtggaccaagaggctcgtgatggtcaaggttgtgcccacgtgcctcagggccttggtagaaatggcccgggtagggggtgcctcctccctggagaatactgtggacctgcacattgacaacagccacccactctccctcacctccgaccagtacaaggcctacctgcaggacttggtggagggcatggatttccagggccctggggagagctga

SEQ ID NO: 469 - DNA, 567 bp, Homo sapiens
  misc_feature 1..567: note = IFN alpha 2
  source 1..567: mol_type = genomic DNA
atggccttgacctttgctttactggtggccctcctggtgctcagctgcaagtcaagctgctctgtgggctgtgatctgcctcaaacccacagcctgggtagcaggaggaccttgatgctcctggcacagatgaggagaatctctcttttctcctgcttgaaggacagacatgactttggatttccccaggaggagtttggcaaccagttccaaaaggctgaaaccatccctgtcctccatgagatgatccagcagatcttcaatctcttcagcacaaaggactcatctgctgcttgggatgagaccctcctagacaaattctacactgaactctaccagcagctgaatgacctggaagcctgtgtgatacagggggtgggggtgacagagactcccctgatgaaggaggactccattctggctgtgaggaaatacttccaaagaatcactctctatctgaaagagaagaaatacagcccttgtgcctgggaggttgtcagagcagaaatcatgagatctttttctttgtcaacaaacttgcaagaaagtttaagaagtaaggaatga

SEQ ID NO: 470 - DNA, 564 bp, Homo sapiens
  misc_feature 1..564: note = IFN beta
  source 1..564: mol_type = genomic DNA
atgaccaacaagtgtctcctccaaattgctctcctgttgtgcttctccactacagctctttccatgagctacaacttgcttggattcctacaaagaagcagcaattttcagtgtcagaagctcctgtggcaattgaatgggaggcttgaatactgcctcaaggacaggatgaactttgacatccctgaggagattaagcagctgcagcagttccagaaggaggacgccgcattgaccatctatgagatgctccagaacatctttgctattttcagacaagattcatctagcactggctggaatgagactattgttgagaacctcctggctaatgtctatcatcagataaaccatctgaagacagtcctggaagaaaaactggagaaagaagatttcaccaggggaaaactcatgagcagtctgcacctgaaaagatattatgggaggattctgcattacctgaaggccaaggagtacagtcactgtgcctggaccatagtcagagtggaaatcctaaggaacttttacttcattaacagacttacaggttacctccgaaactga

SEQ ID NO: 471 - DNA, 23 bp, synthetic construct
  misc_feature 1..23: note = thya-1 primer
  source 1..23: mol_type = other DNA
ccttcccagttgtatgagttggc

SEQ ID NO: 472 - DNA, 52 bp, synthetic construct
  misc_feature 1..52: note = thya-2 primer
  source 1..52: mol_type = other DNA
ctgttatccctagaagcagctccagcctacacctgtgtgccttcatccagca

SEQ ID NO: 473 - DNA, 40 bp, synthetic construct
  misc_feature 1..40: note = thya-3 primer
  source 1..40: mol_type = other DNA
gatgaaggcacacagtgaaattgaaggctatgatccgcac

SEQ ID NO: 474 - DNA, 23 bp, synthetic construct
  misc_feature 1..23: note = thya-4 primer
  source 1..23: mol_type = other DNA
gttgccagccataaagtcctgtg

SEQ ID NO: 475 - DNA, 20 bp, synthetic construct
  misc_feature 1..20: note = thya-5 primer
  source 1..20: mol_type = other DNA
ccatgctctttcctggctca

SEQ ID NO: 476 - DNA, 21 bp, synthetic construct
  misc_feature 1..21: note = thya-6 primer
  source 1..21: mol_type = other DNA
ctgacaaagcaccatgaaccg

SEQ ID NO: 477 - DNA, 20 bp, synthetic construct
  misc_feature 1..20: note = FRT-3 primer
  source 1..20: mol_type = other DNA
gtgtaggctggagctgcttc

SEQ ID NO: 478 - DNA, 21 bp, synthetic construct
  misc_feature 1..21: note = loxp-4 primer
  source 1..21: mol_type = other DNA
ggcttcccaaccttaccagag

SEQ ID NO: 479 - DNA, 203 bp, synthetic construct
  misc_feature 1..203: note = thyA MHA gBlock fragment
  source 1..203: mol_type = other DNA
ggcttcccaaccttaccagagggcgccccagctggcaattccgggtaccggcaagtagggataacagggtaatgttatctgcagaccaaggacccagattatgcagcaacacgtttcctgaggaaccatgaaacagtatttagaactgatgcaaaaagtgctggatgaaggcacacagtgaaattgaaggctatgatccgcac

SEQ ID NO: 480 - protein, 15 aa, synthetic construct
  REGION 1..15: note = amino acid linker
GGGGSGGGGSGGGGS

SEQ ID NO: 481 - protein, 70 aa, synthetic construct
  REGION 1..70: note = transmembrane and cytosolic portions of murineCD80
PPEDPPDSKNTLVLFGAGFGAVITVVVIVVIIKCFCKHRSCFRRNEASRETNNSLTFGPEEALAEQTVFL

SEQ ID NO: 482 - protein, 328 aa, synthetic construct
  REGION 1..328: note = human IL-12p40
MCHQQLVISWFSLVFLASPLVAIWELKKDVYVVELDWYPDAPGEMVVLTCDTPEEDGITWTLDQSSEVLGSGKTLTIQVKEFGDAGQYTCHKGGEVLSHSLLLLHKKEDGIWSTDILKDQKEPKNKTFLRCEAKNYSGRFTCWWLTTISTDLTFSVKSSRGSSDPQGVTCGAATLSAERVRGDNKEYEYSVECQEDSACPAAEESLPIEVMVDAVHKLKYENYTSSFFIRDIIKPDPPKNLQLKPLKNSRQVEVSWEYPDTWSTPHSYFSLTFCVQVQGKSKREKKDRVFTDKTSATVICRKNASISVRAQDRYYSSSWSEWASVPCS

SEQ ID NO: 483 - protein, 197 aa, synthetic construct
  REGION 1..197: note = human IL-12p35
RNLPVATPDPGMFPCLHHSQNLLRAVSNMLQKARQTLEFYPCTSEEIDHEDITKDKTSTVEACLPLELTKNESCLNSRETSFITNGSCLASRKTSFMMALCLSSIYEDLKMYQVEFKTMNAKLLMDPKRQIFLDQNMLAVIDELMQALNFNSETVPQKSSLEEPDFYKTKIKLCILLHAFRIRAVTIDRVMSYLNAS

SEQ ID NO: 484 - protein, 48 aa, synthetic construct
  REGION 1..48: note = transmembrane and cytosolic portions of human CD80
DNLLPSWAITLISVNGIFVICCLTYCFAPRCRERRRNERLRRESVRPV

SEQ ID NO: 485 - protein, 512 aa, synthetic construct
  REGION 1..512: note = SC16.56 DLL3HLxCD3HL
  REGION 1..21: note = misc_feature - mouse IgGK leader
  REGION 22..139: note = misc_feature - SC16.56 VH
  REGION 140..154: note = misc_feature - amino acid GS linker
  REGION 155..261: note = misc_feature - SC16.56 VL
  REGION 262..266: note = misc_feature - amino acid linker
  REGION 267..382: note = misc_feature - 145-2C11 VH
  REGION 383..397: note = misc_feature - amino acid GS linker
  REGION 398..504: note = misc_feature - 145-2C11 VL
  REGION 505..512: note = misc_feature - Flag tag
METDTLLLWVLLLWVPGSTGDQIQLVQSGPELKKPGETVKISCKASGYTFTNYGMNWVKQAPGKGLKWMAWINTYTGEPTYADDFKGRFAFSLETSASTASLQIINLKNEDTATYFCARIGDSSPSDYWGQGTTLTVSSGGGGSGGGGSGGGGSSIVMTQTPKFLLVSAGDRVTITCKASQSVSNDVVWYQQKPGQSPKLLIYYASNRYTGVPDRFAGSGYGTDFSFTISTVQAEDLAVYFCQQDYTSPWTFGGGTKLEIRGGGGSEVQLVESGGGLVQPGKSLKLSCEASGFTFSGYGMHWVRQAPGRGLESVAYITSSSINIKYADAVKGRFTVSRDNAKNLLFLQMNILKSEDTAMYYCARFDWDKNYWGQGTMVTVSSGGGGSGGGGSGGGGSDIQMTQSPSSLPASLGDRVTINCQASQDISNYLNWYQQKPGKAPKLLIYYTNKLADGVPSRFSGSGSGRDSSFTISSLESEDIGSYYCQQYYNYPWTFGPGTKLEIKDYKDDDDK

SEQ ID NO: 486 - protein, 512 aa, synthetic construct
  REGION 1..512: note = SC16.56 DLL3LHxCD3HL
  REGION 1..21: note = misc_feature - mouse IgGK leader
  REGION 22..128: note = misc_feature - SC16.56 VL
  REGION 129..143: note = misc_feature - amino acid GS linker
  REGION 144..261: note = misc_feature - SC16.56 VH
  REGION 262..266: note = misc_feature - amino acid linker
  REGION 267..382: note = misc_feature - 145-2C11 VH
  REGION 383..397: note = misc_feature - amino acid GS linker
  REGION 398..504: note = misc_feature - 145-2C11 VL
  REGION 505..512: note = misc_feature - Flag tag
METDTLLLWVLLLWVPGSTGDSIVMTQTPKFLLVSAGDRVTITCKASQSVSNDVVWYQQKPGQSPKLLIYYASNRYTGVPDRFAGSGYGTDFSFTISTVQAEDLAVYFCQQDYTSPWTFGGGTKLEIRGGGGSGGGGSGGGGSQIQLVQSGPELKKPGETVKISCKASGYTFTNYGMNWVKQAPGKGLKWMAWINTYTGEPTYADDFKGRFAFSLETSASTASLQIINLKNEDTATYFCARIGDSSPSDYWGQGTTLTVSSGGGGSEVQLVESGGGLVQPGKSLKLSCEASGFTFSGYGMHWVRQAPGRGLESVAYITSSSINIKYADAVKGRFTVSRDNAKNLLFLQMNILKSEDTAMYYCARFDWDKNYWGQGTMVTVSSGGGGSGGGGSGGGGSDIQMTQSPSSLPASLGDRVTINCQASQDISNYLNWYQQKPGKAPKLLIYYTNKLADGVPSRFSGSGSGRDSSFTISSLESEDIGSYYCQQYYNYPWTFGPGTKLEIKDYKDDDDK

SEQ ID NO: 487 - protein, 511 aa, synthetic construct
  REGION 1..511: note = SC16.15 DLL3HLxCD3HL
  REGION 1..21: note = misc_feature - mouse IgGK leader
  REGION 22..138: note = misc_feature - SC16.15 VH
  REGION 139..153: note = misc_feature - amino acid GS linker
  REGION 154..260: note = misc_feature - SC16.15 VL
  REGION 261..265: note = misc_feature - amino acid linker
  REGION 266..381: note = misc_feature - 145-2C11 VH
  REGION 382..396: note = misc_feature - amino acid GS linker
  REGION 397..503: note = misc_feature - 145-2C11 VL
  REGION 504..511: note = misc_feature - Flag tag
METDTLLLWVLLLWVPGSTGDQVQLQQSGAELAKPGASVKMSCKASGYTFTRYWIHWIKQRPGQGLEWIGYINPTTVYTEFNQNFKDKATLTADKSSTTASMQLSSLTSEDSAVYYCARGGSNFFDYWGQGTTLTVSSGGGGSGGGGSGGGGSDIQMTQSPASLAASVGETVAITCRASENIYYNLAWYQQKQGKSPQLLIYTANSLEDGVPSRFSGSGSGTQYSLKINSMQPEDSATYFCKQAYDVPPTFGGGTKLEIKGGGGSEVQLVESGGGLVQPGKSLKLSCEASGFTFSGYGMHWVRQAPGRGLESVAYITSSSINIKYADAVKGRFTVSRDNAKNLLFLQMNILKSEDTAMYYCARFDWDKNYWGQGTMVTVSSGGGGSGGGGSGGGGSDIQMTQSPSSLPASLGDRVTINCQASQDISNYLNWYQQKPGKAPKLLIYYTNKLADGVPSRFSGSGSGRDSSFTISSLESEDIGSYYCQQYYNYPWTFGPGTKLEIKDYKDDDDK

SEQ ID NO: 488 - protein, 511 aa, synthetic construct
  REGION 1..511: note = SC16.15 DLL3LHxCD3HL
  REGION 1..21: note = misc_feature - mouse IgGK leader
  REGION 22..128: note = misc_feature - SC16.15 VL
  REGION 129..143: note = misc_feature - amino acid GS linker
  REGION 144..260: note = misc_feature - SC16.15 VH
  REGION 261..265: note = misc_feature - amino acid linker
  REGION 266..381: note = misc_feature - 145-2C11 VH
  REGION 382..396: note = misc_feature - amino acid GS linker
  REGION 397..503: note = misc_feature - 145-2C11 VL
  REGION 504..511: note = misc_feature - Flag tag
METDTLLLWVLLLWVPGSTGDDIQMTQSPASLAASVGETVAITCRASENIYYNLAWYQQKQGKSPQLLIYTANSLEDGVPSRFSGSGSGTQYSLKINSMQPEDSATYFCKQAYDVPPTFGGGTKLEIKGGGGSGGGGSGGGGSQVQLQQSGAELAKPGASVKMSCKASGYTFTRYWIHWIKQRPGQGLEWIGYINPTTVYTEFNQNFKDKATLTADKSSTTASMQLSSLTSEDSAVYYCARGGSNFFDYWGQGTTLTVSSGGGGSEVQLVESGGGLVQPGKSLKLSCEASGFTFSGYGMHWVRQAPGRGLESVAYITSSSINIKYADAVKGRFTVSRDNAKNLLFLQMNILKSEDTAMYYCARFDWDKNYWGQGTMVTVSSGGGGSGGGGSGGGGSDIQMTQSPSSLPASLGDRVTINCQASQDISNYLNWYQQKPGKAPKLLIYYTNKLADGVPSRFSGSGSGRDSSFTISSLESEDIGSYYCQQYYNYPWTFGPGTKLEIKDYKDDDDK

SEQ ID NO: 489 - protein, 512 aa, synthetic construct
  REGION 1..512: note = SC16.34 DLL3HLxCD3HL
  REGION 1..21: note = misc_feature - mouse IgGK leader
  REGION 22..139: note = misc_feature - SC16.34 VH
  REGION 140..154: note = misc_feature - amino acid GS linker
  REGION 155..261: note = misc_feature - SC16.34 VL
  REGION 262..266: note = misc_feature - amino acid linker
  REGION 267..382: note = misc_feature - 145-2C11 VH
  REGION 383..397: note = misc_feature - amino acid GS linker
  REGION 398..504: note = misc_feature - 145-2C11 VL
  REGION 505..512: note = misc_feature - Flag tag
METDTLLLWVLLLWVPGSTGDQIQLVQSGPELKRPGETVKISCKASGYTFTNYGMNWVKQAPGKGLKWMGWINTYTGDPTYADDFKGRFAFSLETSASTAYLQINNLKNEDTATYFCARIGGNSPSDYWGQGTSLTVSSGGGGSGGGGSGGGGSSIVMTQTPKFLLVSAGDRVTITCKASQSVSNDVAWYQQKPGQSPKLLIYYASNRYSGVPDRFTGSGYGTDFTFTISTVQAEDLAVYFCQQDYSSPWTFGGGTKLEIKGGGGSEVQLVESGGGLVQPGKSLKLSCEASGFTFSGYGMHWVRQAPGRGLESVAYITSSSINIKYADAVKGRFTVSRDNAKNLLFLQMNILKSEDTAMYYCARFDWDKNYWGQGTMVTVSSGGGGSGGGGSGGGGSDIQMTQSPSSLPASLGDRVTINCQASQDISNYLNWYQQKPGKAPKLLIYYTNKLADGVPSRFSGSGSGRDSSFTISSLESEDIGSYYCQQYYNYPWTFGPGTKLEIKDYKDDDDK

SEQ ID NO: 490 - protein, 512 aa, synthetic construct
  REGION 1..512: note = SC16.34 DLL3LHxCD3HL
  REGION 1..21: note = misc_feature - mouse IgGK leader
  REGION 22..128: note = misc_feature - SC16.34 VL
  REGION 129..143: note = misc_feature - amino acid GS linker
  REGION 144..261: note = misc_feature - SC16.34 VH
  REGION 262..266: note = misc_feature - amino acid linker
  REGION 267..382: note = misc_feature - 145-2C11 VH
  REGION 383..397: note = misc_feature - amino acid GS linker
  REGION 398..504: note = misc_feature - 145-2C11 VL
  REGION 505..512: note = misc_feature - Flag tag
METDTLLLWVLLLWVPGSTGDSIVMTQTPKFLLVSAGDRVTITCKASQSVSNDVAWYQQKPGQSPKLLIYYASNRYSGVPDRFTGSGYGTDFTFTISTVQAEDLAVYFCQQDYSSPWTFGGGTKLEIKGGGGSGGGGSGGGGSQIQLVQSGPELKRPGETVKISCKASGYTFTNYGMNWVKQAPGKGLKWMGWINTYTGDPTYADDFKGRFAFSLETSASTAYLQINNLKNEDTATYFCARIGGNSPSDYWGQGTSLTVSSGGGGSEVQLVESGGGLVQPGKSLKLSCEASGFTFSGYGMHWVRQAPGRGLESVAYITSSSINIKYADAVKGRFTVSRDNAKNLLFLQMNILKSEDTAMYYCARFDWDKNYWGQGTMVTVSSGGGGSGGGGSGGGGSDIQMTQSPSSLPASLGDRVTINCQASQDISNYLNWYQQKPGKAPKLLIYYTNKLADGVPSRFSGSGSGRDSSFTISSLESEDIGSYYCQQYYNYPWTFGPGTKLEIKDYKDDDDK

SEQ ID NO: 491 - DNA, 60 bp, synthetic construct
  misc_feature 1..60: note = codon optimized leader sequence
  source 1..60: mol_type = other DNA
atggagacacctgcccagctgctgttcctgctgctgctgtggctgcccgacaccaccggc

SEQ ID NO: 492 - protein, 8 aa, synthetic construct
  REGION 1..8: note = ovalbumin peptide
SIINFEKL

SEQ ID NO: 493 - protein, 427 aa, synthetic construct
  REGION 1..427: note = human IRF3 S396D
MGTPKPRILPWLVSQLDLGQLEGVAWVNKSRTRFRIPWKHGLRQDAQQEDFGIFQAWAEATGAYVPGRDKPDLPTWKRNFRSALNRKEGLRLAEDRSKDPHDPHKIYEFVNSGVGDFSQPDTSPDTNGGGSTSDTQEDILDELLGNMVLAPLPDPGPPSLAVAPEPCPQPLRSPSLDNPTPFPNLGPSENPLKRLLVPGEEWEFEVTAFYRGRQVFQQTISCPEGLRLVGSEVGDRTLPGWPVTLPDPGMSLTDRGVMSYVRHVLSCLGGGLALWRAGQWLWAQRLGHCHTYWAVSEELLPNSGHGPDGEVPKDKEGGVFDLGPFIVDLITFTEGSGRSPRYALWFCVGESWPQDQPWTKRLVMVKVVPTCLRALVEMARVGGASSLENTVDLHIDNSHPLSLTSDQYKAYLQDLVEGMDFQGPGES

SEQ ID NO: 494 - protein, 188 aa, Homo sapiens
  REGION 1..188: note = IFN alpha 2
MALTFALLVALLVLSCKSSCSVGCDLPQTHSLGSRRTLMLLAQMRRISLFSCLKDRHDFGFPQEEFGNQFQKAETIPVLHEMIQQIFNLFSTKDSSAAWDETLLDKFYTELYQQLNDLEACVIQGVGVTETPLMKEDSILAVRKYFQRITLYLKEKKYSPCAWEVVRAEIMRSFSLSTNLQESLRSKE

SEQ ID NO: 495 - protein, 187 aa, Homo sapiens
  REGION 1..187: note = IFN beta
MTNKCLLQIALLLCFSTTALSMSYNLLGFLQRSSNFQCQKLLWQLNGRLEYCLKDRMNFDIPEEIKQLQQFQKEDAALTIYEMLQNIFAIFRQDSSSTGWNETIVENLLANVYHQINHLKTVLEEKLEKEDFTRGKLMSSLHLKRYYGRILHYLKAKEYSHCAWTIVRVEILRNFYFINRLTGYLRN

SEQ ID NO: 496 - DNA, 20 bp, synthetic construct
  misc_feature 1..20: note = IL-15 Fwd Primer
  source 1..20: mol_type = other DNA
gcaagaggaatttgccatcg

SEQ ID NO: 497 - DNA, 19 bp, synthetic construct
  misc_feature 1..19: note = IL-15 Rev Primer
  source 1..19: mol_type = other DNA
ttgctccatcccgctaatg

SEQ ID NO: 498 - DNA, 22 bp, synthetic construct
  misc_feature 1..22: note = STING Fwd Primer
  source 1..22: mol_type = other DNA
aactctggtttcaagcgtaaag

SEQ ID NO: 499 - DNA, 19 bp, synthetic construct
  misc_feature 1..19: note = STING Rev Primer
  source 1..19: mol_type = other DNA
cagggcagggtctctaatg

SEQ ID NO: 500 - protein, 379 aa, synthetic construct
  REGION 1..379: note = human STING N154S/R284G-tasmanian devil CTT
MPHSSLHPSIPCPRGHGAQKAALVLLSACLVTLWGLGEPPEHTLRYLVLHLASLQLGLLLNGVCSLAEELRHIHSRYRGSYWRTVRACLGCPLRRGALLLLSIYFYYSLPNAVGPPFTWMLALLGLSQALNILLGLKGLAPAEISAVCEKGNFSVAHGLAWSYYIGYLRLILPELQARIRTYNQHYNNLLRGAVSQRLYILLPLDCGVPDNLSMADPNIRFLDKLPQQTGDRAGIKDRVYSNSIYELLENGQRAGTCVLEYATPLQTLFAMSQYSQAGFSREDGLEQAKLFCRTLEDILADAPESQNNCRLIAYQEPADDSSFSLSQEVLRHLRQERQEEFAIGPKRAMTVTTSSTLSQEPQLLISGMEQPLSLRTDGF

SEQ ID NO: 501 - DNA, 6297 bp, synthetic construct
  misc_feature 1..6297: note = Synthetic DNA construct
  regulatory 1704..2007: note = enhancer - CMV; regulatory_class = enhancer
  regulatory 2008..2211: note = promoter - CMV promoter; regulatory_class = promoter
  misc_feature 2256..2802: note = VCIP IRES
  gene 2803..3126: note = huIL-15Ra leader+sushi
  misc_feature 3127..3186: note = (Gly4-Ser)4 linker
  gene 3187..3531: note = huIL-15 extracellular
  gene 3541..3594: note = T2A
  gene 3595..4731: note = hSTING N154S/R284G tazCTT
  misc_feature 4741..5274: note = HPRE
  regulatory 5283..5507: note = polyA_signal - bGH poly(A) signal; regulatory_class = polyA_signal_sequence
  source 1..6297: mol_type = other DNA
  rep_origin 822..1410
gaacaatggcgtgaagacctttgtgggcggtaactgtaccgttagcctgatgttgatgtcgctgggcggtctctttgcccataatctcgttgactgggtatccgtcgcgacctatcaggccgcctccggcggcggcgcgcgccatatgcgcgagctgttaacccagatgggtcagttgtatggccatgtcgccgatgaactggcgacgccgtcttccgcaattcttgatattgaacgcaaagttacggcattgacccgcagcggcgagctgccggttgataactttggcgtaccgctggcgggaagcctgatcccctggatcgacaaacagctcgataacggccagagccgcgaagagtggaaaggccaggcggaaaccaacaagattctcaatactgcctctgtgattccggttgatggtttgtgtgtgcgcgtcggcgcgctgcgctgtcacagccaggcgttcaccatcaagctgaaaaaagaggtatccattccgacggtggaagaactgctggcggcacataatccgtgggcgaaagtggtgccgaacgatcgtgatatcactatgcgcgaattaaccccggcggcggtgaccggcacgttgactacgccggttggtcgtctgcgtaagctgaacatggggccagagttcttgtcggcgtttaccgtaggcgaccagttgttatggggcgccgccgagccgctgcgtcgaatgctgcgccagttggcgtagttgataatctcatgaccaaaatcccttaacgtgagttttcgttccactgagcgtcagaccccgtagaaaagatcaaaggatcttcttgagatcctttttttctgcgcgtaatctgctgcttgcaaacaaaaaaaccaccgctaccagcggtggtttgtttgccggatcaagagctaccaactctttttccgaaggtaactggcttcagcagagcgcagataccaaatactgtccttctagtgtagccgtagttaggccaccacttcaagaactctgtagcaccgcctacatacctcgctctgctaatcctgttaccagtggctgctgccagtggcgataagtcgtgtcttaccgggttggactcaagacgatagttaccggataaggcgcagcggtcgggctgaacggggggttcgtgcacacagcccagcttggagcgaacgacctacaccgaactgagatacctacagcgtgagctatgagaaagcgccacgcttcccgaagggagaaaggcggacaggtatccggtaagcggcagggtcggaacaggagagcgcacgagggagcttccagggggaaacgcctggtatctttatagtcctgtcgggtttcgccacctctgacttgagcgtcgatttttgtgatgctcgtcaggggggcggagcctatggaaaaacgccagcaacgcggcctttttacggttcctggccttttgctggccttttgctcacatgttctttcctgcgttatcccctgattctgtggataaccgtattaccgcctttgagtgagctgataccgctcgccgcagccgaacgaccgagcgcagcgagtcagtgagcgaggaagcggtagagcgcccaatacgcaaaccgcctctccccgcgcgttggccgattcattaatgcagctggcacgacaggtttcccgactggaaagcgggcagtgagcgcaacgcaagtcgacccgttacataacttacggtaaatggcccgcctggctgaccgcccaacgacccccgcccattgacgtcaataatgacgtatgttcccatagtaacgccaatagggactttccattgacgtcaatgggtggagtatttacggtaaactgcccacttggcagtacatcaagtgtatcatatgccaagtacgccccctattgacgtcaatgacggtaaatggcccgcctggcattatgcccagtacatgaccttatgggactttcctacttggcagtacatctacgtattagtcatcgctattaccatggtgatgcggttttggcagtacatcaatgggcgtggatagcggtttgactcacggggatttccaagtctccaccccattgacgtcaatgggagtttgttttggcaccaaaatcaacgggactttccaaaatgtcgtaacaactccgccccattgacgcaaatgggcggtaggcgtgtacggtgggaggtctatataagcagagctggtttagtgaaccgtcttaagcgctagcgattacgccaagctcgagaaaacaaacccaggcgatcacagcagcagccgccgcggcagcagcaccaacagcaggaggagcaggaggagccggaggaggaggaggaggaggaggcaaagttagagttggggctggcgctccggagttgctgggctcagcgcagctcccattcattaaggaaccagctgcggaggaaggtggccgagcgcccgcgctgcccactcgctcgctcgcgcactcagacgcgcgccacaacagcgcgccccaagctgcgcagctctgcaaaagtttctgctcgggatctggctctcttccccttggactttagaacgatttagggttgacagaggaaagcagaggcgcgcaggaggagcagaaaacaccaccttctgcagttggaggcaggcagccccggctgcactctagccgccgcgcccggagccggggccgacccgccactatccgcagcagcctcggccaggaggcgacccgggcgcctgggtgtgtggctgctgttgcgggacgtcttcgcggggcgggaggctcgcgccgcagccagcgccatggccccgcggcgggcgcgcggctgccggaccctcggtctcccggcgctgctactgctgctgctgctccggccgccggcgacgcggggcatcacgtgccctccccccatgtccgtggaacacgcagacatctgggtcaagagctacagcttgtactccagggagcggtacatttgtaactctggtttcaagcgtaaagccggcacgtccagcctgacggagtgcgtgttgaacaaggccacgaatgtcgcccactggacaacccccagtctcaaatgcattagagaccctgccctggttcaccaaaggccagcgccaccctccggtggcggtggctcgggcggtggtgggtcgggtggcggcggatctggtggcggtggctcggccaactgggtgaatgtaataagtgatttgaaaaaaattgaagatcttattcaatctatgcatattgatgctactttatatacggaaagtgatgttcaccccagttgcaaagtaacagcaatgaagtgctttctcttggagttacaagttatttcacttgagtccggagatgcaagtattcatgatacagtagaaaatctgatcatcctagcaaacaacagtttgtcttctaatgggaatgtaacagaatctggatgcaaagaatgtgaggaactggaggaaaaaaatattaaagaatttttgcagagttttgtacatattgtccaaatgttcatcaacacttctggatcaggcgagggaagaggctcgcttctgacttgcggcgatgtcgaggaaaacccgggccctccccactccagcctgcatccatccatcccgtgtcccaggggtcacggggcccagaaggcagccttggttctgctgagtgcctgcctggtgaccctttgggggctaggagagccaccagagcacactctccggtacctggtcctccacctagcctccctgcagctgggactgctgttaaacggggtctgcagcctggctgaggagctgcgccacatccactccaggtaccggggcagctactggaggactgtgcgggcctgcctgggctgccccctccgccgtggggccctgttgctgctgtccatctatttctactactccctcccaaatgcggtcggcccgcccttcacttggatgcttgccctcctgggcctctcgcaggcactgaacatcctcctgggcctcaagggcctggccccagctgagatctctgcagtgtgtgaaaaagggaatttcagcgtggcccatgggctggcatggtcatattacatcggatatctgcggctgatcctgccagagctccaggcccggattcgaacttacaatcagcattacaacaacctgctacggggtgcagtgagccagcggctgtatattctcctcccattggactgtggggtgcctgataacctgagtatggctgaccccaacattcgcttcctggataaactgccccagcagaccggtgaccgtgctggcatcaaggatcgggtttacagcaacagcatctatgagcttctggagaacgggcagcgggcgggcacctgtgtcctggagtacgccacccccttgcagactttgtttgccatgtcacaatacagtcaagctggctttagccgggaggatggccttgagcaggccaaactcttctgccggacacttgaggacatcctggcagatgcccctgagtctcagaacaactgccgcctcattgcctaccaggaacctgcagatgacagcagcttctcgctgtcccaggaggttctccggcacctgcggcaggagaggcaagaggaatttgccatcggccccaaaagagcgatgacagtgactacttcctccactctcagccaggagccccagttgctcattagcgggatggagcaaccgctttctctgcgcacagacgggttctgaaccggtatgttgctcggcaacggcctggtctgtgccaagtgtttgctgacgcaacccccactggctggggcttggccataggccatcagcgcatgcgtggaacctttgtggctcctctgccgatccatactgcggaactcctagccgcttgttttgctcgcagccggtctggggcaaagctcatcggaactgacaattctgtcgtcctctcgcggaaatatacatcgtttccatggctgctaggttgtactgccaactgcatccttcgcgggacgtcctttgtttacgtcccgtcggcgctgaatcccgcggacgacccctctcggggccgcttgggactctctcgtccccttctccgtctgccgttccagccgaccacggggcgcacctctctttacgcggtctccccgtctgtgccttctcatctgccggtccgtgtgcacttcgcttcacctctgcacgttgcatggagaccaccgtgaacgcccatcagatcctgcccaaggtcttacataagaggactcttggactcccagcaatgtcggcgcgccctgtgccttctagttgccagccatctgttgtttgcccctcccccgtgccttccttgaccctggaaggtgccactcccactgtcctttcctaataaaatgaggaaattgcatcgcattgtctgagtaggtgtcattctattctggggggtggggtggggcaggacagcaagggggaggattgggaagacaatagcaggcatgctggggatgcggtgggctctatggggatccgctccggctcgagttaagccagccccgacacccgccaacacccgctgacgcgccctgacgggcttgtctgctcccggcatccgcttacagacaagctgtgaccgtctccgggagctgcatgtgtcagaggttttcaccgtcatcaccgaaacgcgcgagacgaaagggcctcgtgatacgcctatttttataggttaatgtcatgataataatggtttcttagacgtcaggtggcacttttcggggaaatgtgaagcttctgtcagaccaagtttactcatatatactttagattgatttaaaacttcatttttaatttaaaaggatctaggtgaagatcctttatggtgaaggatgcgccacaggatactggcgcgcatacacagcacatctctttgcaggaaaaaaacgctatgaaaaatgttggttttatcggctggcgcggaatggtcggctctgttctcatgcaacgcatggtagaggagcgcgatttcgacgctattcgccctgttttcttttctacctcccagtttggacaggcggcgcccaccttcggcgacacctccaccggcacgctacaggacgcttttgatctggatgcgctaaaagcgctcgatatcatcgtgacctgccagggcggcgattataccaacgaaatttatccaaagctgcgcgaaagcggatggcagggttactggattgatgcggcttctacgctgcgcatgaaagatgatgccattattattctcgacccggtcaaccaggacgtgattaccgacggcct

SEQ ID NO: 502 - DNA, 7310 bp, synthetic construct
  misc_feature 1..7310: note = Synthetic DNA construct
  regulatory 1704..2007: note = enhancer - CMV; regulatory_class = enhancer
  regulatory 2008..2211: note = promoter - CMV promoter; regulatory_class = promoter
  regulatory 2197..2203: note = TATA_signal - TATA signal; regulatory_class = TATA_box
  misc_feature 2256..2261: note = Kozak sequence
  gene 2265..2825: note = hIFNa2 NM_000605.4 opt 15
  misc_feature 2838..3371: note = HPRE
  regulatory 3380..3604: note = polyA_signal - bGH poly(A) signal; regulatory_class = polyA_signal_sequence
  regulatory 3635..3846: note = promoter - EF-1-alpha core promoter; regulatory_class = promoter
  regulatory 3784..3790: note = TATA_signal - TATA signal; regulatory_class = TATA_box
  misc_feature 4161..4166: note = Kozak sequence
  gene 4170..4727: note = huIFNb opt 15
  misc_feature 4780..5368: note = WPRE
  regulatory 5391..5512: note = polyA_signal - SV40 poly(A) signal; regulatory_class = polyA_signal_sequence
  source 1..7310: mol_type = other DNA
  rep_origin 822..1410
  5'UTR 2212..2255
  misc_feature 3605..3634: note = Promoter spacer
  misc_feature 3859..4127: note = LTR
gaacaatggcgtgaagacctttgtgggcggtaactgtaccgttagcctgatgttgatgtcgctgggcggtctctttgcccataatctcgttgactgggtatccgtcgcgacctatcaggccgcctccggcggcggcgcgcgccatatgcgcgagctgttaacccagatgggtcagttgtatggccatgtcgccgatgaactggcgacgccgtcttccgcaattcttgatattgaacgcaaagttacggcattgacccgcagcggcgagctgccggttgataactttggcgtaccgctggcgggaagcctgatcccctggatcgacaaacagctcgataacggccagagccgcgaagagtggaaaggccaggcggaaaccaacaagattctcaatactgcctctgtgattccggttgatggtttgtgtgtgcgcgtcggcgcgctgcgctgtcacagccaggcgttcaccatcaagctgaaaaaagaggtatccattccgacggtggaagaactgctggcggcacataatccgtgggcgaaagtggtgccgaacgatcgtgatatcactatgcgcgaattaaccccggcggcggtgaccggcacgttgactacgccggttggtcgtctgcgtaagctgaacatggggccagagttcttgtcggcgtttaccgtaggcgaccagttgttatggggcgccgccgagccgctgcgtcgaatgctgcgccagttggcgtagttgataatctcatgaccaaaatcccttaacgtgagttttcgttccactgagcgtcagaccccgtagaaaagatcaaaggatcttcttgagatcctttttttctgcgcgtaatctgctgcttgcaaacaaaaaaaccaccgctaccagcggtggtttgtttgccggatcaagagctaccaactctttttccgaaggtaactggcttcagcagagcgcagataccaaatactgtccttctagtgtagccgtagttaggccaccacttcaagaactctgtagcaccgcctacatacctcgctctgctaatcctgttaccagtggctgctgccagtggcgataagtcgtgtcttaccgggttggactcaagacgatagttaccggataaggcgcagcggtcgggctgaacggggggttcgtgcacacagcccagcttggagcgaacgacctacaccgaactgagatacctacagcgtgagctatgagaaagcgccacgcttcccgaagggagaaaggcggacaggtatccggtaagcggcagggtcggaacaggagagcgcacgagggagcttccagggggaaacgcctggtatctttatagtcctgtcgggtttcgccacctctgacttgagcgtcgatttttgtgatgctcgtcaggggggcggagcctatggaaaaacgccagcaacgcggcctttttacggttcctggccttttgctggccttttgctcacatgttctttcctgcgttatcccctgattctgtggataaccgtattaccgcctttgagtgagctgataccgctcgccgcagccgaacgaccgagcgcagcgagtcagtgagcgaggaagcggtagagcgcccaatacgcaaaccgcctctccccgcgcgttggccgattcattaatgcagctggcacgacaggtttcccgactggaaagcgggcagtgagcgcaacgcaagtcgacccgttacataacttacggtaaatggcccgcctggctgaccgcccaacgacccccgcccattgacgtcaataatgacgtatgttcccatagtaacgccaatagggactttccattgacgtcaatgggtggagtatttacggtaaactgcccacttggcagtacatcaagtgtatcatatgccaagtacgccccctattgacgtcaatgacggtaaatggcccgcctggcattatgcccagtacatgaccttatgggactttcctacttggcagtacatctacgtattagtcatcgctattaccatggtgatgcggttttggcagtacatcaatgggcgtggatagcggtttgactcacggggatttccaagtctccaccccattgacgtcaatgggagtttgttttggcaccaaaatcaacgggactttccaaaatgtcgtaacaactccgccccattgacgcaaatgggcggtaggcgtgtacggtgggaggtctatataagcagagctggtttagtgaaccgtcttaagcgctagcgattacgccaagctcggccaccatggccctcaccttcgctctcctggtggccctcctggtgctcagctgcaagtcaagctgctctgtgggctgtgatctgcctcaaacccacagcctgggtagcaggaggaccctgatgctgctggcccagatgaggagaatcagcctgttcagctgcctgaaggacagacacgactttggattcccccaggaggagtttggcaaccagttccaaaaggctgagaccatcccagtgctgcacgagatgatccagcagatctttaacctgttcagcaccaaggatagcagcgccgcctgggatgaaaccctgctagacaaattctacaccgagctgtaccagcagctgaacgacctggaggcctgcgtgattcagggcgtgggcgtgacagagacacccctgatgaaggaggacagcatcctggccgtgaggaagtacttccagagaatcaccctgtacctgaaggagaagaagtacagcccatgcgcctgggaggtggtgagagccgagatcatgaggagcttcagcctgagcaccaacctgcaggagagcctgagaagcaaggagtgaaccggtatgttgctcggcaacggcctggtctgtgccaagtgtttgctgacgcaacccccactggctggggcttggccataggccatcagcgcatgcgtggaacctttgtggctcctctgccgatccatactgcggaactcctagccgcttgttttgctcgcagccggtctggggcaaagctcatcggaactgacaattctgtcgtcctctcgcggaaatatacatcgtttccatggctgctaggttgtactgccaactgcatccttcgcgggacgtcctttgtttacgtcccgtcggcgctgaatcccgcggacgacccctctcggggccgcttgggactctctcgtccccttctccgtctgccgttccagccgaccacggggcgcacctctctttacgcggtctccccgtctgtgccttctcatctgccggtccgtgtgcacttcgcttcacctctgcacgttgcatggagaccaccgtgaacgcccatcagatcctgcccaaggtcttacataagaggactcttggactcccagcaatgtcggcgcgccctgtgccttctagttgccagccatctgttgtttgcccctcccccgtgccttccttgaccctggaaggtgccactcccactgtcctttcctaataaaatgaggaaattgcatcgcattgtctgagtaggtgtcattctattctggggggtggggtggggcaggacagcaagggggaggattgggaagacaatagcaggcatgctggggatgcggtgggctctatggggatccgctccgggaattctgcccgtcagtgggcagagcgcacatcgcccacagtccccgagaagttggggggaggggtcggcaattgaacgggtgcctagagaaggtggcgcggggtaaactgggaaagtgatgtcgtgtactggctccgcctttttcccgagggtgggggagaaccgtatataagtgcagtagtcgccgtgaacgttctttttcgcaacgggtttgccgccagaacacagctgaagcttcgaggggctcgcatctctccttcacgcgcccgccgccctacctgaggccgccatccacgccggttgagtcgcgttctgccgcctcccgcctgtggtgcctcctgaactgcgtccgccgtctaggtaagtttaaagctcaggtcgagaccgggcctttgtccggcgctcccttggagcctacctagactcagccggctctccacgctttgcctgaccctgcttgctcaactctacgtctttgtttcgttttctgttctgcgccgttacagatccaagctgtgaccggcgcctacctgagatcaccggccaccatgaccaacaagtgcctgctgcagatcgccctgctgctgtgcttcagcaccaccgccctgagcatgagctacaacctgttgggcttcctgcagagaagcagcaacttccagtgccagaagctgctgtggcagctgaacggcaggctggagtactgcctgaaggaccggatgaacttcgacatccccgaggagatcaagcagctgcagcagttccagaaggaggacgccgccctgaccatctacgagatgctgcagaacatctttgccatcttcagacaggactcttcctctaccggctggaacgagaccattgttgagaacctgctggccaacgtctaccaccagatcaaccatctgaagaccgtgctggaggagaagctggagaaggaagacttcaccaggggcaaactgatgagctctctgcacctgaaaagatactacggcaggatcctgcactacctgaaggccaaggagtacagtcactgtgcctggaccattgtgagagtggagatcctgaggaacttctacttcatcaacagactgaccggctacctgaggaactgaggccgcgactcgcggccgcctatgtacctcctgcttacaacacgctagcaatcaacctctggattacaaaatttgtgaaagattgactggtattcttaactatgttgctccttttacgctatgtggatacgctgctttaatgcctttgtatcatgctattgcttcccgtatggctttcattttctcctccttgtataaatcctggttgctgtctctttatgaggagttgtggcccgttgtcaggcaacgtggcgtggtgtgcactgtgtttgctgacgcaacccccactggttggggcattgccaccacctgtcagctcctttccgggactttcgctttccccctccctattgccacggcggaactcatcgccgcctgccttgcccgctgctggacaggggctcggctgttgggcactgacaattccgtggtgttgtcggggaagctgacgtcctttccatggctgctcgcctgtgttgccacctggattctgcgcgggacgtccttctgctacgtcccttcggccctcaatccagcggaccttccttcccgcggcctgctgccggctctgcggcctcttccgcgtcttcgccttcgccctcagacgagtcggatctccctttgggccgcctccccgcctggctagctggccagacatgataagatacattgatgagtttggacaaaccacaactagaatgcagtgaaaaaaatgctttatttgtgaaatttgtgatgctattgctttatttgtaaccattataagctgcaataaacaagttaacaacaacaattgcattcattttatgtttcaggttcagggggaggtgtgggaggttttttaaagcaagtaaaacctctacaaatgtggtatggctcgagttaagccagccccgacacccgccaacacccgctgacgcgccctgacgggcttgtctgctcccggcatccgcttacagacaagctgtgaccgtctccgggagctgcatgtgtcagaggttttcaccgtcatcaccgaaacgcgcgagacgaaagggcctcgtgatacgcctatttttataggttaatgtcatgataataatggtttcttagacgtcaggtggcacttttcggggaaatgtgaagctttagaaaaactcatcgagcatcaaatgaaactgcaatttattcatatcaggattatcaataccatatttttgaaaaagccgtttctgtaatgaaggagaaaactcaccgaggcagttccataggatggcaagatcctggtatcggtctgcgattccgactcgtccaacatcaatacaacctattaatttcccctcgtcaaaaataaggttatcaagtgagaaatcaccatgagtgacgactgaatccggtgagaatggcaaaagtttatgcatttctttccagacttgttcaacaggccagccattacgctcgtcatcaaaatcactcgcatcaaccaaaccgttattcattcgtgattgcgcctgagcgagacgaaatacgcgatcgctgttaaaaggacaattacaaacaggaatcgaatgcaaccggcgcaggaacactgccagcgcatcaacaatattttcacctgaatcaggatattcttctaatacctggaatgctgtttttccggggatcgcagtggtgagtaaccatgcatcatcaggagtacggataaaatgcttgatggtcggaagaggcataaattccgtcagccagtttagtctgaccatctcatctgtaacatcattggcaacgctacctttgccatgtttcagaaacaactctggcgcatcgggcttcccatacaagcgatagattgtcgcacctgattgcccgacattatcgcgagcccatttatacccatataaatcagcatccatgttggaatttaatcgcggcctcgacgtttcccgttgaatatggctcataacaccccttgtattactgtttatgtaagcagacagttttattgttcatgatgatatatttttatcttgtgcaatgtaacatcagagattttgagacacgggccagagctgcaagcttctgtcagaccaagtttactcatatatactttagattgatttaaaacttcatttttaatttaaaaggatctaggtgaagatcctttatggtgaaggatgcgccacaggatactggcgcgcatacacagcacatctctttgcaggaaaaaaacgctatgaaaaatgttggttttatcggctggcgcggaatggtcggctctgttctcatgcaacgcatggtagaggagcgcgatttcgacgctattcgccctgttttcttttctacctcccagtttggacaggcggcgcccaccttcggcgacacctccaccggcacgctacaggacgcttttgatctggatgcgctaaaagcgctcgatatcatcgtgacctgccagggcggcgattataccaacgaaatttatccaaagctgcgcgaaagcggatggcagggttactggattgatgcggcttctacgctgcgcatgaaagatgatgccattattattctcgacccggtcaaccaggacgtgattaccgacggcct

SEQ ID NO: 503 - DNA, 7310 bp, synthetic construct
  misc_feature 1..7310: note = Synthetic DNA construct
  regulatory 1704..2007: note = enhancer - CMV; regulatory_class = enhancer
  regulatory 2008..2211: note = promoter - CMV promoter; regulatory_class = promoter
  gene 2265..2825: note = hIFNa2 NM_000605.4
  misc_feature 2838..3371: note = HPRE
  regulatory 3380..3604: note = polyA_signal - bGH poly(A) signal; regulatory_class = polyA_signal_sequence
  regulatory 3635..3846: note = promoter - EF-1-alpha core promoter; regulatory_class = promoter
  gene 4170..4727: note = huIFNb
  misc_feature 4780..5368: note = WPRE
  regulatory 5391..5512: note = polyA_signal - SV40 poly(A) signal; regulatory_class = polyA_signal_sequence
  source 1..7310: mol_type = other DNA
  rep_origin 822..1410
  regulatory 2197..2203: note = TATA signal; regulatory_class = TATA_box
  misc_feature 2256..2261: note = Kozak sequence
  misc_feature 4161..4166: note = Kozak sequence
  5'UTR 2212..2255
  misc_feature 3859..4127: note = LTR
  regulatory 3784..3790: note = TATA signal; regulatory_class = TATA_box
gaacaatggcgtgaagacctttgtgggcggtaactgtaccgttagcctgatgttgatgtcgctgggcggtctctttgcccataatctcgttgactgggtatccgtcgcgacctatcaggccgcctccggcggcggcgcgcgccatatgcgcgagctgttaacccagatgggtcagttgtatggccatgtcgccgatgaactggcgacgccgtcttccgcaattcttgatattgaacgcaaagttacggcattgacccgcagcggcgagctgccggttgataactttggcgtaccgctggcgggaagcctgatcccctggatcgacaaacagctcgataacggccagagccgcgaagagtggaaaggccaggcggaaaccaacaagattctcaatactgcctctgtgattccggttgatggtttgtgtgtgcgcgtcggcgcgctgcgctgtcacagccaggcgttcaccatcaagctgaaaaaagaggtatccattccgacggtggaagaactgctggcggcacataatccgtgggcgaaagtggtgccgaacgatcgtgatatcactatgcgcgaattaaccccggcggcggtgaccggcacgttgactacgccggttggtcgtctgcgtaagctgaacatggggccagagttcttgtcggcgtttaccgtaggcgaccagttgttatggggcgccgccgagccgctgcgtcgaatgctgcgccagttggcgtagttgataatctcatgaccaaaatcccttaacgtgagttttcgttccactgagcgtcagaccccgtagaaaagatcaaaggatcttcttgagatcctttttttctgcgcgtaatctgctgcttgcaaacaaaaaaaccaccgctaccagcggtggtttgtttgccggatcaagagctaccaactctttttccgaaggtaactggcttcagcagagcgcagataccaaatactgtccttctagtgtagccgtagttaggccaccacttcaagaactctgtagcaccgcctacatacctcgctctgctaatcctgttaccagtggctgctgccagtggcgataagtcgtgtcttaccgggttggactcaagacgatagttaccggataaggcgcagcggtcgggctgaacggggggttcgtgcacacagcccagcttggagcgaacgacctacaccgaactgagatacctacagcgtgagctatgagaaagcgccacgcttcccgaagggagaaaggcggacaggtatccggtaagcggcagggtcggaacaggagagcgcacgagggagcttccagggggaaacgcctggtatctttatagtcctgtcgggtttcgccacctctgacttgagcgtcgatttttgtgatgctcgtcaggggggcggagcctatggaaaaacgccagcaacgcggcctttttacggttcctggccttttgctggccttttgctcacatgttctttcctgcgttatcccctgattctgtggataaccgtattaccgcctttgagtgagctgataccgctcgccgcagccgaacgaccgagcgcagcgagtcagtgagcgaggaagcggtagagcgcccaatacgcaaaccgcctctccccgcgcgttggccgattcattaatgcagctggcacgacaggtttcccgactggaaagcgggcagtgagcgcaacgcaagtcgacccgttacataacttacggtaaatggcccgcctggctgaccgcccaacgacccccgcccattgacgtcaataatgacgtatgttcccatagtaacgccaatagggactttccattgacgtcaatgggtggagtatttacggtaaactgcccacttggcagtacatcaagtgtatcatatgccaagtacgccccctattgacgtcaatgacggtaaatggcccgcctggcattatgcccagtacatgaccttatgggactttcctacttggcagtacatctacgtattagtcatcgctattaccatggtgatgcggttttggcagtacatcaatgggcgtggatagcggtttgactcacggggatttccaagtctccaccccattgacgtcaatgggagtttgttttggcaccaaaatcaacgggactttccaaaatgtcgtaacaactccgccccattgacgcaaatgggcggtaggcgtgtacggtgggaggtctatataagcagagctggtttagtgaaccgtcttaagcgctagcgattacgccaagctcggccaccatggccttgacctttgctttactggtggccctcctggtgctcagctgcaagtcaagctgctctgtgggctgtgatctgcctcaaacccacagcctgggtagcaggaggaccttgatgctcctggcacagatgaggagaatctctcttttctcctgcttgaaggacagacatgactttggatttccccaggaggagtttggcaaccagttccaaaaggctgaaaccatccctgtcctccatgagatgatccagcagatcttcaatctcttcagcacaaaggactcatctgctgcttgggatgagaccctcctagacaaattctacactgaactctaccagcagctgaatgacctggaagcctgtgtgatacagggggtgggggtgacagagactcccctgatgaaggaggactccattctggctgtgaggaaatacttccaaagaatcactctctatctgaaagagaagaaatacagcccttgtgcctgggaggttgtcagagcagaaatcatgagatctttttctttgtcaacaaacttgcaagaaagtttaagaagtaaggaatgaaccggtatgttgctcggcaacggcctggtctgtgccaagtgtttgctgacgcaacccccactggctggggcttggccataggccatcagcgcatgcgtggaacctttgtggctcctctgccgatccatactgcggaactcctagccgcttgttttgctcgcagccggtctggggcaaagctcatcggaactgacaattctgtcgtcctctcgcggaaatatacatcgtttccatggctgctaggttgtactgccaactgcatccttcgcgggacgtcctttgtttacgtcccgtcggcgctgaatcccgcggacgacccctctcggggccgcttgggactctctcgtccccttctccgtctgccgttccagccgaccacggggcgcacctctctttacgcggtctccccgtctgtgccttctcatctgccggtccgtgtgcacttcgcttcacctctgcacgttgcatggagaccaccgtgaacgcccatcagatcctgcccaaggtcttacataagaggactcttggactcccagcaatgtcggcgcgccctgtgccttctagttgccagccatctgttgtttgcccctcccccgtgccttccttgaccctggaaggtgccactcccactgtcctttcctaataaaatgaggaaattgcatcgcattgtctgagtaggtgtcattctattctggggggtggggtggggcaggacagcaagggggaggattgggaagacaatagcaggcatgctggggatgcggtgggctctatggggatccgctccgggaattctgcccgtcagtgggcagagcgcacatcgcccacagtccccgagaagttggggggaggggtcggcaattgaacgggtgcctagagaaggtggcgcggggtaaactgggaaagtgatgtcgtgtactggctccgcctttttcccgagggtgggggagaaccgtatataagtgcagtagtcgccgtgaacgttctttttcgcaacgggtttgccgccagaacacagctgaagcttcgaggggctcgcatctctccttcacgcgcccgccgccctacctgaggccgccatccacgccggttgagtcgcgttctgccgcctcccgcctgtggtgcctcctgaactgcgtccgccgtctaggtaagtttaaagctcaggtcgagaccgggcctttgtccggcgctcccttggagcctacctagactcagccggctctccacgctttgcctgaccctgcttgctcaactctacgtctttgtttcgttttctgttctgcgccgttacagatccaagctgtgaccggcgcctacctgagatcaccggccaccatgaccaacaagtgtctcctccaaattgctctcctgttgtgcttctccactacagctctttccatgagctacaacttgcttggattcctacaaagaagcagcaattttcagtgtcagaagctcctgtggcaattgaatgggaggcttgaatactgcctcaaggacaggatgaactttgacatccctgaggagattaagcagctgcagcagttccagaaggaggacgccgcattgaccatctatgagatgctccagaacatctttgctattttcagacaagattcatctagcactggctggaatgagactattgttgagaacctcctggctaatgtctatcatcagataaaccatctgaagacagtcctggaagaaaaactggagaaagaagatttcaccaggggaaaactcatgagcagtctgcacctgaaaagatattatgggaggattctgcattacctgaaggccaaggagtacagtcactgtgcctggaccatagtcagagtggaaatcctaaggaacttttacttcattaacagacttacaggttacctccgaaactgaggccgcgactcgcggccgcctatgtacctcctgcttacaacacgctagcaatcaacctctggattacaaaatttgtgaaagattgactggtattcttaactatgttgctccttttacgctatgtggatacgctgctttaatgcctttgtatcatgctattgcttcccgtatggctttcattttctcctccttgtataaatcctggttgctgtctctttatgaggagttgtggcccgttgtcaggcaacgtggcgtggtgtgcactgtgtttgctgacgcaacccccactggttggggcattgccaccacctgtcagctcctttccgggactttcgctttccccctccctattgccacggcggaactcatcgccgcctgccttgcccgctgctggacaggggctcggctgttgggcactgacaattccgtggtgttgtcggggaagctgacgtcctttccatggctgctcgcctgtgttgccacctggattctgcgcgggacgtccttctgctacgtcccttcggccctcaatccagcggaccttccttcccgcggcctgctgccggctctgcggcctcttccgcgtcttcgccttcgccctcagacgagtcggatctccctttgggccgcctccccgcctggctagctggccagacatgataagatacattgatgagtttggacaaaccacaactagaatgcagtgaaaaaaatgctttatttgtgaaatttgtgatgctattgctttatttgtaaccattataagctgcaataaacaagttaacaacaacaattgcattcattttatgtttcaggttcagggggaggtgtgggaggttttttaaagcaagtaaaacctctacaaatgtggtatggctcgagttaagccagccccgacacccgccaacacccgctgacgcgccctgacgggcttgtctgctcccggcatccgcttacagacaagctgtgaccgtctccgggagctgcatgtgtcagaggttttcaccgtcatcaccgaaacgcgcgagacgaaagggcctcgtgatacgcctatttttataggttaatgtcatgataataatggtttcttagacgtcaggtggcacttttcggggaaatgtgaagctttagaaaaactcatcgagcatcaaatgaaactgcaatttattcatatcaggattatcaataccatatttttgaaaaagccgtttctgtaatgaaggagaaaactcaccgaggcagttccataggatggcaagatcctggtatcggtctgcgattccgactcgtccaacatcaatacaacctattaatttcccctcgtcaaaaataaggttatcaagtgagaaatcaccatgagtgacgactgaatccggtgagaatggcaaaagtttatgcatttctttccagacttgttcaacaggccagccattacgctcgtcatcaaaatcactcgcatcaaccaaaccgttattcattcgtgattgcgcctgagcgagacgaaatacgcgatcgctgttaaaaggacaattacaaacaggaatcgaatgcaaccggcgcaggaacactgccagcgcatcaacaatattttcacctgaatcaggatattcttctaatacctggaatgctgtttttccggggatcgcagtggtgagtaaccatgcatcatcaggagtacggataaaatgcttgatggtcggaagaggcataaattccgtcagccagtttagtctgaccatctcatctgtaacatcattggcaacgctacctttgccatgtttcagaaacaactctggcgcatcgggcttcccatacaagcgatagattgtcgcacctgattgcccgacattatcgcgagcccatttatacccatataaatcagcatccatgttggaatttaatcgcggcctcgacgtttcccgttgaatatggctcataacaccccttgtattactgtttatgtaagcagacagttttattgttcatgatgatatatttttatcttgtgcaatgtaacatcagagattttgagacacgggccagagctgcaagcttctgtcagaccaagtttactcatatatactttagattgatttaaaacttcatttttaatttaaaaggatctaggtgaagatcctttatggtgaaggatgcgccacaggatactggcgcgcatacacagcacatctctttgcaggaaaaaaacgctatgaaaaatgttggttttatcggctggcgcggaatggtcggctctgttctcatgcaacgcatggtagaggagcgcgatttcgacgctattcgccctgttttcttttctacctcccagtttggacaggcggcgcccaccttcggcgacacctccaccggcacgctacaggacgcttttgatctggatgcgctaaaagcgctcgatatcatcgtgacctgccagggcggcgattataccaacgaaatttatccaaagctgcgcgaaagcggatggcagggttactggattgatgcggcttctacgctgcgcatgaaagatgatgccattattattctcgacccggtcaaccaggacgtgattaccgacggcct

SEQ ID NO: 504 - DNA, 5943 bp, synthetic construct
  misc_feature 1..5943: note = Synthetic DNA construct
  regulatory 1704..2007: note = enhancer - CMV; regulatory_class = enhancer
  regulatory 2008..2211: note = promoter - CMV promoter; regulatory_class = promoter
  gene 2265..2825: note = hIFNa2 NM_000605.4 opt 1
  misc_feature 2826..2834: note = GGS Linker
  gene 2835..2888: note = T2A opt 1
  gene 2889..3446: note = huIFNb opt 1
  misc_feature 3460..3993: note = HPRE
  regulatory 4002..4226: note = polyA_signal - bGH poly(A) signal; regulatory_class = polyA_signal_sequence
  misc_feature 4205..4284: note = Duplexed DNA insert
  source 1..5943: mol_type = other DNA
  rep_origin 822..1410
  regulatory 2197..2203: note = TATA signal; regulatory_class = TATA_box
  misc_feature 2256..2261: note = Kozak sequence
  misc_feature 4205..4284: note = duplexed DNA insert
  5'UTR 2212..2255
gaacaatggcgtgaagacctttgtgggcggtaactgtaccgttagcctgatgttgatgtcgctgggcggtctctttgcccataatctcgttgactgggtatccgtcgcgacctatcaggccgcctccggcggcggcgcgcgccatatgcgcgagctgttaacccagatgggtcagttgtatggccatgtcgccgatgaactggcgacgccgtcttccgcaattcttgatattgaacgcaaagttacggcattgacccgcagcggcgagctgccggttgataactttggcgtaccgctggcgggaagcctgatcccctggatcgacaaacagctcgataacggccagagccgcgaagagtggaaaggccaggcggaaaccaacaagattctcaatactgcctctgtgattccggttgatggtttgtgtgtgcgcgtcggcgcgctgcgctgtcacagccaggcgttcaccatcaagctgaaaaaagaggtatccattccgacggtggaagaactgctggcggcacataatccgtgggcgaaagtggtgccgaacgatcgtgatatcactatgcgcgaattaaccccggcggcggtgaccggcacgttgactacgccggttggtcgtctgcgtaagctgaacatggggccagagttcttgtcggcgtttaccgtaggcgaccagttgttatggggcgccgccgagccgctgcgtcgaatgctgcgccagttggcgtagttgataatctcatgaccaaaatcccttaacgtgagttttcgttccactgagcgtcagaccccgtagaaaagatcaaaggatcttcttgagatcctttttttctgcgcgtaatctgctgcttgcaaacaaaaaaaccaccgctaccagcggtggtttgtttgccggatcaagagctaccaactctttttccgaaggtaactggcttcagcagagcgcagataccaaatactgtccttctagtgtagccgtagttaggccaccacttcaagaactctgtagcaccgcctacatacctcgctctgctaatcctgttaccagtggctgctgccagtggcgataagtcgtgtcttaccgggttggactcaagacgatagttaccggataaggcgcagcggtcgggctgaacggggggttcgtgcacacagcccagcttggagcgaacgacctacaccgaactgagatacctacagcgtgagctatgagaaagcgccacgcttcccgaagggagaaaggcggacaggtatccggtaagcggcagggtcggaacaggagagcgcacgagggagcttccagggggaaacgcctggtatctttatagtcctgtcgggtttcgccacctctgacttgagcgtcgatttttgtgatgctcgtcaggggggcggagcctatggaaaaacgccagcaacgcggcctttttacggttcctggccttttgctggccttttgctcacatgttctttcctgcgttatcccctgattctgtggataaccgtattaccgcctttgagtgagctgataccgctcgccgcagccgaacgaccgagcgcagcgagtcagtgagcgaggaagcggtagagcgcccaatacgcaaaccgcctctccccgcgcgttggccgattcattaatgcagctggcacgacaggtttcccgactggaaagcgggcagtgagcgcaacgcaagtcgacccgttacataacttacggtaaatggcccgcctggctgaccgcccaacgacccccgcccattgacgtcaataatgacgtatgttcccatagtaacgccaatagggactttccattgacgtcaatgggtggagtatttacggtaaactgcccacttggcagtacatcaagtgtatcatatgccaagtacgccccctattgacgtcaatgacggtaaatggcccgcctggcattatgcccagtacatgaccttatgggactttcctacttggcagtacatctacgtattagtcatcgctattaccatggtgatgcggttttggcagtacatcaatgggcgtggatagcggtttgactcacggggatttccaagtctccaccccattgacgtcaatgggagtttgttttggcaccaaaatcaacgggactttccaaaatgtcgtaacaactccgccccattgacgcaaatgggcggtaggcgtgtacggtgggaggtctatataagcagagctggtttagtgaaccgtcttaagcgctagcgattacgccaagctcggccaccatggccctcaccttcgctctgctggttgccctgctggtgctgagctgcaagagtagctgctctgtgggctgtgacctgccccaaacccacagcctgggtagcaggaggaccttgatgcttctggcacagatgcggagaatctcccttttctcctgcttgaaggacagacacgacttcggatttccccaggaggagtttggcaaccagttccaaaaggctgagaccatccccgtgctgcatgagatgatccagcagatcttcaacctgttttccacaaaggactccagcgccgcctgggatgagaccctgttagacaaattctacaccgaactgtaccagcagctgaacgacctggaggcctgcgtgatccagggcgtgggcgtgacagagacacccctgatgaaggaggacagcatcctggctgtgaggaagtacttccagagaatcaccctgtacctgaaggagaagaagtacagcccctgcgcctgggaggttgtgagagccgagatcatgagaagcttcagcctgagcaccaacctgcaagaatctctgagaagcaaagaaggatcaggcgaggggagaggcagccttctgacctgcggcgacgtcgaggaaaaccccggacctaccaacaagtgtctgctccaaatcgctctgctgttgtgcttctccaccacagctctttccatgagctacaacttgctgggattcctacagagaagcagcaattttcagtgtcagaagctcctgtggcagttgaatggcaggctggaatactgcctgaaggacaggatgaacttcgacatccccgaggagatcaagcagctgcagcagttccagaaggaggacgccgccctgaccatctacgagatgctgcagaacatctttgccatcttcagacaggactcttcctccaccggctggaacgagaccattgttgagaacctgctggccaacgtctaccaccagatcaaccatctgaagaccgtgctggaggagaagctggagaaggaagacttcaccaggggcaaactgatgagctctctgcacctgaaaagatactacggcaggatcctgcactacctgaaggccaaggagtacagtcactgtgcctggaccattgtgagagtggagatcctgaggaacttctacttcatcaacagactgaccggctacctgaggaactgaaaccggtatgttgctcggcaacggcctggtctgtgccaagtgtttgctgacgcaacccccactggctggggcttggccataggccatcagcgcatgcgtggaacctttgtggctcctctgccgatccatactgcggaactcctagccgcttgttttgctcgcagccggtctggggcaaagctcatcggaactgacaattctgtcgtcctctcgcggaaatatacatcgtttccatggctgctaggttgtactgccaactgcatccttcgcgggacgtcctttgtttacgtcccgtcggcgctgaatcccgcggacgacccctctcggggccgcttgggactctctcgtccccttctccgtctgccgttccagccgaccacggggcgcacctctctttacgcggtctccccgtctgtgccttctcatctgccggtccgtgtgcacttcgcttcacctctgcacgttgcatggagaccaccgtgaacgcccatcagatcctgcccaaggtcttacataagaggactcttggactcccagcaatgtcggcgcgccctgtgccttctagttgccagccatctgttgtttgcccctcccccgtgccttccttgaccctggaaggtgccactcccactgtcctttcctaataaaatgaggaaattgcatcgcattgtctgagtaggtgtcattctattctggggggtggggtggggcaggacagcaagggggaggattgggaagacaatagcaggcatgctggggatgcggtgggctctatggggatccgctccggctcgagttaagccagccccgacacccgccaacacccgctgacgcgccctgacgggcttgtctgctcccggcatccgcttacagacaagctgtgaccgtctccgggagctgcatgtgtcagaggttttcaccgtcatcaccgaaacgcgcgagacgaaagggcctcgtgatacgcctatttttataggttaatgtcatgataataatggtttcttagacgtcaggtggcacttttcggggaaatgtgaagctttagaaaaactcatcgagcatcaaatgaaactgcaatttattcatatcaggattatcaataccatatttttgaaaaagccgtttctgtaatgaaggagaaaactcaccgaggcagttccataggatggcaagatcctggtatcggtctgcgattccgactcgtccaacatcaatacaacctattaatttcccctcgtcaaaaataaggttatcaagtgagaaatcaccatgagtgacgactgaatccggtgagaatggcaaaagtttatgcatttctttccagacttgttcaacaggccagccattacgctcgtcatcaaaatcactcgcatcaaccaaaccgttattcattcgtgattgcgcctgagcgagacgaaatacgcgatcgctgttaaaaggacaattacaaacaggaatcgaatgcaaccggcgcaggaacactgccagcgcatcaacaatattttcacctgaatcaggatattcttctaatacctggaatgctgtttttccggggatcgcagtggtgagtaaccatgcatcatcaggagtacggataaaatgcttgatggtcggaagaggcataaattccgtcagccagtttagtctgaccatctcatctgtaacatcattggcaacgctacctttgccatgtttcagaaacaactctggcgcatcgggcttcccatacaagcgatagattgtcgcacctgattgcccgacattatcgcgagcccatttatacccatataaatcagcatccatgttggaatttaatcgcggcctcgacgtttcccgttgaatatggctcataacaccccttgtattactgtttatgtaagcagacagttttattgttcatgatgatatatttttatcttgtgcaatgtaacatcagagattttgagacacgggccagagctgcaagcttctgtcagaccaagtttactcatatatactttagattgatttaaaacttcatttttaatttaaaaggatctaggtgaagatcctttatggtgaaggatgcgccacaggatactggcgcgcatacacagcacatctctttgcaggaaaaaaacgctatgaaaaatgttggttttatcggctggcgcggaatggtcggctctgttctcatgcaacgcatggtagaggagcgcgatttcgacgctattcgccctgttttcttttctacctcccagtttggacaggcggcgcccaccttcggcgacacctccaccggcacgctacaggacgcttttgatctggatgcgctaaaagcgctcgatatcatcgtgacctgccagggcggcgattataccaacgaaatttatccaaagctgcgcgaaagcggatggcagggttactggattgatgcggcttctacgctgcgcatgaaagatgatgccattattattctcgacccggtcaaccaggacgtgattaccgacggcct

SEQ ID NO: 505 - DNA, 5943 bp, synthetic construct
  misc_feature 1..5943: note = Synthetic DNA construct
  regulatory 1704..2007: note = enhancer - CMV; regulatory_class = enhancer
  regulatory 2008..2211: note = promoter - CMV promoter; regulatory_class = promoter
  gene 2265..2825: note = hIFNa2 NM_000605.4
  misc_feature 2826..2834: note = GGS Linker
  gene 2835..2888: note = T2A
  gene 2889..3446: note = huIFNb
  misc_feature 3460..3993: note = HPRE
  regulatory 4002..4226: note = polyA_signal - bGH poly(A) signal; regulatory_class = polyA_signal_sequence
  misc_feature 4205..4284: note = Duplexed DNA insert
  source 1..5943: mol_type = other DNA
  regulatory 2197..2203: note = TATA signal; regulatory_class = TATA_box
  misc_feature 2256..2261: note = Kozak sequence
  rep_origin 822..1410
  5'UTR 2212..2255
gaacaatggcgtgaagacctttgtgggcggtaactgtaccgttagcctgatgttgatgtcgctgggcggtctctttgcccataatctcgttgactgggtatccgtcgcgacctatcaggccgcctccggcggcggcgcgcgccatatgcgcgagctgttaacccagatgggtcagttgtatggccatgtcgccgatgaactggcgacgccgtcttccgcaattcttgatattgaacgcaaagttacggcattgacccgcagcggcgagctgccggttgataactttggcgtaccgctggcgggaagcctgatcccctggatcgacaaacagctcgataacggccagagccgcgaagagtggaaaggccaggcggaaaccaacaagattctcaatactgcctctgtgattccggttgatggtttgtgtgtgcgcgtcggcgcgctgcgctgtcacagccaggcgttcaccatcaagctgaaaaaagaggtatccattccgacggtggaagaactgctggcggcacataatccgtgggcgaaagtggtgccgaacgatcgtgatatcactatgcgcgaattaaccccggcggcggtgaccggcacgttgactacgccggttggtcgtctgcgtaagctgaacatggggccagagttcttgtcggcgtttaccgtaggcgaccagttgttatggggcgccgccgagccgctgcgtcgaatgctgcgccagttggcgtagttgataatctcatgaccaaaatcccttaacgtgagttttcgttccactgagcgtcagaccccgtagaaaagatcaaaggatcttcttgagatcctttttttctgcgcgtaatctgctgcttgcaaacaaaaaaaccaccgctaccagcggtggtttgtttgccggatcaagagctaccaactctttttccgaaggtaactggcttcagcagagcgcagataccaaatactgtccttctagtgtagccgtagttaggccaccacttcaagaactctgtagcaccgcctacatacctcgctctgctaatcctgttaccagtggctgctgccagtggcgataagtcgtgtcttaccgggttggactcaagacgatagttaccggataaggcgcagcggtcgggctgaacggggggttcgtgcacacagcccagcttggagcgaacgacctacaccgaactgagatacctacagcgtgagctatgagaaagcgccacgcttcccgaagggagaaaggcggacaggtatccggtaagcggcagggtcggaacaggagagcgcacgagggagcttccagggggaaacgcctggtatctttatagtcctgtcgggtttcgccacctctgacttgagcgtcgatttttgtgatgctcgtcaggggggcggagcctatggaaaaacgccagcaacgcggcctttttacggttcctggccttttgctggccttttgctcacatgttctttcctgcgttatcccctgattctgtggataaccgtattaccgcctttgagtgagctgataccgctcgccgcagccgaacgaccgagcgcagcgagtcagtgagcgaggaagcggtagagcgcccaatacgcaaaccgcctctccccgcgcgttggccgattcattaatgcagctggcacgacaggtttcccgactggaaagcgggcagtgagcgcaacgcaagtcgacccgttacataacttacggtaaatggcccgcctggctgaccgcccaacgacccccgcccattgacgtcaataatgacgtatgttcccatagtaacgccaatagggactttccattgacgtcaatgggtggagtatttacggtaaactgcccacttggcagtacatcaagtgtatcatatgccaagtacgccccctattgacgtcaatgacggtaaatggcccgcctggcattatgcccagtacatgaccttatgggactttcctacttggcagtacatctacgtattagtcatcgctattaccatggtgatgcggttttggcagtacatcaatgggcgtggatagcggtttgactcacggggatttccaagtctccaccccattgacgtcaatgggagtttgttttggcaccaaaatcaacgggactttccaaaatgtcgtaacaactccgccccattgacgcaaatgggcggtaggcgtgtacggtgggaggtctatataagcagagctggtttagtgaaccgtcttaagcgctagcgattacgccaagctcggccaccatggccttgacctttgctttactggtggccctcctggtgctcagctgcaagtcaagctgctctgtgggctgtgatctgcctcaaacccacagcctgggtagcaggaggaccttgatgctcctggcacagatgaggagaatctctcttttctcctgcttgaaggacagacatgactttggatttccccaggaggagtttggcaaccagttccaaaaggctgaaaccatccctgtcctccatgagatgatccagcagatcttcaatctcttcagcacaaaggactcatctgctgcttgggatgagaccctcctagacaaattctacactgaactctaccagcagctgaatgacctggaagcctgtgtgatacagggggtgggggtgacagagactcccctgatgaaggaggactccattctggctgtgaggaaatacttccaaagaatcactctctatctgaaagagaagaaatacagcccttgtgcctgggaggttgtcagagcagaaatcatgagatctttttctttgtcaacaaacttgcaagaaagtttaagaagtaaggaaggatcaggcgagggaagaggctcgcttctgacttgcggcgatgtcgaggaaaacccgggacctaccaacaagtgtctcctccaaattgctctcctgttgtgcttctccactacagctctttccatgagctacaacttgcttggattcctacaaagaagcagcaattttcagtgtcagaagctcctgtggcaattgaatgggaggcttgaatactgcctcaaggacaggatgaactttgacatccctgaggagattaagcagctgcagcagttccagaaggaggacgccgcattgaccatctatgagatgctccagaacatctttgctattttcagacaagattcatctagcactggctggaatgagactattgttgagaacctcctggctaatgtctatcatcagataaaccatctgaagacagtcctggaagaaaaactggagaaagaagatttcaccaggggaaaactcatgagcagtctgcacctgaaaagatattatgggaggattctgcattacctgaaggccaaggagtacagtcactgtgcctggaccatagtcagagtggaaatcctaaggaacttttacttcattaacagacttacaggttacctccgaaactgaaaccggtatgttgctcggcaacggcctggtctgtgccaagtgtttgctgacgcaacccccactggctggggcttggccataggccatcagcgcatgcgtggaacctttgtggctcctctgccgatccatactgcggaactcctagccgcttgttttgctcgcagccggtctggggcaaagctcatcggaactgacaattctgtcgtcctctcgcggaaatatacatcgtttccatggctgctaggttgtactgccaactgcatccttcgcgggacgtcctttgtttacgtcccgtcggcgctgaatcccgcggacgacccctctcggggccgcttgggactctctcgtccccttctccgtctgccgttccagccgaccacggggcgcacctctctttacgcggtctccccgtctgtgccttctcatctgccggtccgtgtgcacttcgcttcacctctgcacgttgcatggagaccaccgtgaacgcccatcagatcctgcccaaggtcttacataagaggactcttggactcccagcaatgtcggcgcgccctgtgccttctagttgccagccatctgttgtttgcccctcccccgtgccttccttgaccctggaaggtgccactcccactgtcctttcctaataaaatgaggaaattgcatcgcattgtctgagtaggtgtcattctattctggggggtggggtggggcaggacagcaagggggaggattgggaagacaatagcaggcatgctggggatgcggtgggctctatggggatccgctccggctcgagttaagccagccccgacacccgccaacacccgctgacgcgccctgacgggcttgtctgctcccggcatccgcttacagacaagctgtgaccgtctccgggagctgcatgtgtcagaggttttcaccgtcatcaccgaaacgcgcgagacgaaagggcctcgtgatacgcctatttttataggttaatgtcatgataataatggtttcttagacgtcaggtggcacttttcggggaaatgtgaagctttagaaaaactcatcgagcatcaaatgaaactgcaatttattcatatcaggattatcaataccatatttttgaaaaagccgtttctgtaatgaaggagaaaactcaccgaggcagttccataggatggcaagatcctggtatcggtctgcgattccgactcgtccaacatcaatacaacctattaatttcccctcgtcaaaaataaggttatcaagtgagaaatcaccatgagtgacgactgaatccggtgagaatggcaaaagtttatgcatttctttccagacttgttcaacaggccagccattacgctcgtcatcaaaatcactcgcatcaaccaaaccgttattcattcgtgattgcgcctgagcgagacgaaatacgcgatcgctgttaaaaggacaattacaaacaggaatcgaatgcaaccggcgcaggaacactgccagcgcatcaacaatattttcacctgaatcaggatattcttctaatacctggaatgctgtttttccggggatcgcagtggtgagtaaccatgcatcatcaggagtacggataaaatgcttgatggtcggaagaggcataaattccgtcagccagtttagtctgaccatctcatctgtaacatcattggcaacgctacctttgccatgtttcagaaacaactctggcgcatcgggcttcccatacaagcgatagattgtcgcacctgattgcccgacattatcgcgagcccatttatacccatataaatcagcatccatgttggaatttaatcgcggcctcgacgtttcccgttgaatatggctcataacaccccttgtattactgtttatgtaagcagacagttttattgttcatgatgatatatttttatcttgtgcaatgtaacatcagagattttgagacacgggccagagctgcaagcttctgtcagaccaagtttactcatatatactttagattgatttaaaacttcatttttaatttaaaaggatctaggtgaagatcctttatggtgaaggatgcgccacaggatactggcgcgcatacacagcacatctctttgcaggaaaaaaacgctatgaaaaatgttggttttatcggctggcgcggaatggtcggctctgttctcatgcaacgcatggtagaggagcgcgatttcgacgctattcgccctgttttcttttctacctcccagtttggacaggcggcgcccaccttcggcgacacctccaccggcacgctacaggacgcttttgatctggatgcgctaaaagcgctcgatatcatcgtgacctgccagggcggcgattataccaacgaaatttatccaaagctgcgcgaaagcggatggcagggttactggattgatgcggcttctacgctgcgcatgaaagatgatgccattattattctcgacccggtcaaccaggacgtgattaccgacggcct

SEQ ID NO: 506 - DNA, 6476 bp, synthetic construct
  misc_feature 1..6476: note = Synthetic DNA construct
  regulatory 1704..2007: note = enhancer - CMV; regulatory_class = enhancer
  regulatory 2008..2211: note = promoter - CMV promoter; regulatory_class = promoter
  gene 2265..2835: note = hIFNa2 NM_000605.4 opt 12
  regulatory 2829..3418: note = RBS - VCIP IRES ATUM; regulatory_class = ribosome_binding_site
  gene 3422..3979: note = huIFNb opt 12
  misc_feature 3993..4526: note = HPRE
  regulatory 4535..4759: note = polyA_signal - bGH poly(A) signal; regulatory_class = polyA_signal_sequence
  misc_feature 4738..4817: note = Duplexed DNA insert
  source 1..6476: mol_type = other DNA
  rep_origin 822..1410
  regulatory 2197..2203: note = TATA signal; regulatory_class = TATA_box
  misc_feature 2256..2261: note = Kozak sequence
  5'UTR 2212..2255
gaacaatggcgtgaagacctttgtgggcggtaactgtaccgttagcctgatgttgatgtcgctgggcggtctctttgcccataatctcgttgactgggtatccgtcgcgacctatcaggccgcctccggcggcggcgcgcgccatatgcgcgagctgttaacccagatgggtcagttgtatggccatgtcgccgatgaactggcgacgccgtcttccgcaattcttgatattgaacgcaaagttacggcattgacccgcagcggcgagctgccggttgataactttggcgtaccgctggcgggaagcctgatcccctggatcgacaaacagctcgataacggccagagccgcgaagagtggaaaggccaggcggaaaccaacaagattctcaatactgcctctgtgattccggttgatggtttgtgtgtgcgcgtcggcgcgctgcgctgtcacagccaggcgttcaccatcaagctgaaaaaagaggtatccattccgacggtggaagaactgctggcggcacataatccgtgggcgaaagtggtgccgaacgatcgtgatatcactatgcgcgaattaaccccggcggcggtgaccggcacgttgactacgccggttggtcgtctgcgtaagctgaacatggggccagagttcttgtcggcgtttaccgtaggcgaccagttgttatggggcgccgccgagccgctgcgtcgaatgctgcgccagttggcgtagttgataatctcatgaccaaaatcccttaacgtgagttttcgttccactgagcgtcagaccccgtagaaaagatcaaaggatcttcttgagatcctttttttctgcgcgtaatctgctgcttgcaaacaaaaaaaccaccgctaccagcggtggtttgtttgccggatcaagagctaccaactctttttccgaaggtaactggcttcagcagagcgcagataccaaatactgtccttctagtgtagccgtagttaggccaccacttcaagaactctgtagcaccgcctacatacctcgctctgctaatcctgttaccagtggctgctgccagtggcgataagtcgtgtcttaccgggttggactcaagacgatagttaccggataaggcgcagcggtcgggctgaacggggggttcgtgcacacagcccagcttggagcgaacgacctacaccgaactgagatacctacagcgtgagctatgagaaagcgccacgcttcccgaagggagaaaggcggacaggtatccggtaagcggcagggtcggaacaggagagcgcacgagggagcttccagggggaaacgcctggtatctttatagtcctgtcgggtttcgccacctctgacttgagcgtcgatttttgtgatgctcgtcaggggggcggagcctatggaaaaacgccagcaacgcggcctttttacggttcctggccttttgctggccttttgctcacatgttctttcctgcgttatcccctgattctgtggataaccgtattaccgcctttgagtgagctgataccgctcgccgcagccgaacgaccgagcgcagcgagtcagtgagcgaggaagcggtagagcgcccaatacgcaaaccgcctctccccgcgcgttggccgattcattaatgcagctggcacgacaggtttcccgactggaaagcgggcagtgagcgcaacgcaagtcgacccgttacataacttacggtaaatggcccgcctggctgaccgcccaacgacccccgcccattgacgtcaataatgacgtatgttcccatagtaacgccaatagggactttccattgacgtcaatgggtggagtatttacggtaaactgcccacttggcagtacatcaagtgtatcatatgccaagtacgccccctattgacgtcaatgacggtaaatggcccgcctggcattatgcccagtacatgaccttatgggactttcctacttggcagtacatctacgtattagtcatcgctattaccatggtgatgcggttttggcagtacatcaatgggcgtggatagcggtttgactcacggggatttccaagtctccaccccattgacgtcaatgggagtttgttttggcaccaaaatcaacgggactttccaaaatgtcgtaacaactccgccccattgacgcaaatgggcggtaggcgtgtacggtgggaggtctatataagcagagctggtttagtgaaccgtcttaagcgctagcgattacgccaagctcggccaccatggccctcaccttcgctctcctggtggccctcctggtgctcagctgcaagtcaagctgctctgtgggctgtgatctgcctcaaacccacagcctgggtagcaggaggaccctgatgctgctggcccagatgaggagaatcagcctgttcagctgcctgaaggacagacacgactttggattcccccaggaggagtttggcaaccagttccaaaaggctgagaccatccccgtgctgcacgagatgatccagcagatcttcaacctgttcagcacaaaggacagctccgctgcttgggatgagaccctgctagacaaattctacaccgagctgtaccagcagctgaacgacctggaggcctgcgtgatacagggcgtgggcgtgactgagactcccctgatgaaggaggactctatcctggcagtgaggaagtacttccagagaatcaccctgtacctgaaagagaagaaatacagcccctgtgcctgggaggtggtgagagccgagatcatgagatctttttctttgtcaacaaacctgcaagagtctctccggagcaaggaatgatgatagtggcagtttatggcgggcgtcctgcccgccaccctccagaaaacaaacccaggcgatcacagcagcagccgccgcggcagcagcaccaacagcaggaggagcaggaggagccggaggaggaggaggaggaggaggcaaagttagagttggggctggcgctccggagttgctgggctcagcgcagctcccattcattaaggaaccagctgcggaggaaggtggccgagcgcccgcgctgcccactcgctcgctcgcgcactcagacgcgcgccacaacagcgcgccccaagctgcgcagctctgcaaaagtttctgctcgggatctggctctcttccccttggactttagaacgatttagggttgacagaggaaagcagaggcgcgcaggaggagcagaaaacaccaccttctgcagttggaggcaggcagccccggctgcactctagccgccgcgcccggagccggggccgacccgccactatccgcagcagcctcggccaggaggcgacccgggcgcctgggtgtgtggctgctgttgcgggacgtcttcgcggggcgggaggctcgcgccgcagccagcgccatgaccaacaagtgtctccttcagattgcactgctgttgtgcttctccaccacagctctctccatgagctacaacctgcttggattcctgcaaagaagcagcaatttccagtgccagaagctcctgtggcaattgaatgggaggcttgagtactgcctcaaggatcggatgaacttcgacatccccgaggagattaagcagctgcagcagttccagaaggaggacgccgccctgaccatctacgagatgctgcagaacatcttcgccatcttcagacaggacagctccagcaccggctggaatgagactatcgtggagaacctgctggccaatgtgtaccatcagatcaaccacctgaagacagtgctggaggagaagctggagaaggaagacttcaccaggggcaaactgatgagctctctgcacctgaagagatattacggcaggatcctgcactacctgaaggccaaggagtacagtcactgtgcctggaccattgtgagagtggagatcctgaggaacttctacttcatcaacagactgaccggctacctgaggaactgaaaccggtatgttgctcggcaacggcctggtctgtgccaagtgtttgctgacgcaacccccactggctggggcttggccataggccatcagcgcatgcgtggaacctttgtggctcctctgccgatccatactgcggaactcctagccgcttgttttgctcgcagccggtctggggcaaagctcatcggaactgacaattctgtcgtcctctcgcggaaatatacatcgtttccatggctgctaggttgtactgccaactgcatccttcgcgggacgtcctttgtttacgtcccgtcggcgctgaatcccgcggacgacccctctcggggccgcttgggactctctcgtccccttctccgtctgccgttccagccgaccacggggcgcacctctctttacgcggtctccccgtctgtgccttctcatctgccggtccgtgtgcacttcgcttcacctctgcacgttgcatggagaccaccgtgaacgcccatcagatcctgcccaaggtcttacataagaggactcttggactcccagcaatgtcggcgcgccctgtgccttctagttgccagccatctgttgtttgcccctcccccgtgccttccttgaccctggaaggtgccactcccactgtcctttcctaataaaatgaggaaattgcatcgcattgtctgagtaggtgtcattctattctggggggtggggtggggcaggacagcaagggggaggattgggaagacaatagcaggcatgctggggatgcggtgggctctatggggatccgctccggctcgagttaagccagccccgacacccgccaacacccgctgacgcgccctgacgggcttgtctgctcccggcatccgcttacagacaagctgtgaccgtctccgggagctgcatgtgtcagaggttttcaccgtcatcaccgaaacgcgcgagacgaaagggcctcgtgatacgcctatttttataggttaatgtcatgataataatggtttcttagacgtcaggtggcacttttcggggaaatgtgaagctttagaaaaactcatcgagcatcaaatgaaactgcaatttattcatatcaggattatcaataccatatttttgaaaaagccgtttctgtaatgaaggagaaaactcaccgaggcagttccataggatggcaagatcctggtatcggtctgcgattccgactcgtccaacatcaatacaacctattaatttcccctcgtcaaaaataaggttatcaagtgagaaatcaccatgagtgacgactgaatccggtgagaatggcaaaagtttatgcatttctttccagacttgttcaacaggccagccattacgctcgtcatcaaaatcactcgcatcaaccaaaccgttattcattcgtgattgcgcctgagcgagacgaaatacgcgatcgctgttaaaaggacaattacaaacaggaatcgaatgcaaccggcgcaggaacactgccagcgcatcaacaatattttcacctgaatcaggatattcttctaatacctggaatgctgtttttccggggatcgcagtggtgagtaaccatgcatcatcaggagtacggataaaatgcttgatggtcggaagaggcataaattccgtcagccagtttagtctgaccatctcatctgtaacatcattggcaacgctacctttgccatgtttcagaaacaactctggcgcatcgggcttcccatacaagcgatagattgtcgcacctgattgcccgacattatcgcgagcccatttatacccatataaatcagcatccatgttggaatttaatcgcggcctcgacgtttcccgttgaatatggctcataacaccccttgtattactgtttatgtaagcagacagttttattgttcatgatgatatatttttatcttgtgcaatgtaacatcagagattttgagacacgggccagagctgcaagcttctgtcagaccaagtttactcatatatactttagattgatttaaaacttcatttttaatttaaaaggatctaggtgaagatcctttatggtgaaggatgcgccacaggatactggcgcgcatacacagcacatctctttgcaggaaaaaaacgctatgaaaaatgttggttttatcggctggcgcggaatggtcggctctgttctcatgcaacgcatggtagaggagcgcgatttcgacgctattcgccctgttttcttttctacctcccagtttggacaggcggcgcccaccttcggcgacacctccaccggcacgctacaggacgcttttgatctggatgcgctaaaagcgctcgatatcatcgtgacctgccagggcggcgattataccaacgaaatttatccaaagctgcgcgaaagcggatggcagggttactggattgatgcggcttctacgctgcgcatgaaagatgatgccattattattctcgacccggtcaaccaggacgtgattaccgacggcct

SEQ ID NO: 507 - DNA, 6476 bp, synthetic construct
  misc_feature 1..6476: note = Synthetic DNA construct
  regulatory 1704..2007: note = enhancer - CMV; regulatory_class = enhancer
  regulatory 2008..2211: note = promoter - CMV promoter; regulatory_class = promoter
  gene 2265..2825: note = hIFNa2 NM_000605.4
  regulatory 2829..3418: note = RBS - VCIP IRES ATUM; regulatory_class = ribosome_binding_site
  gene 3422..3979: note = huIFNb
  misc_feature 3993..4526: note = HPRE
  regulatory 4535..4759: note = polyA_signal - bGH poly(A) signal; regulatory_class = polyA_signal_sequence
  misc_feature 4738..4817: note = Duplexed DNA insert
  source 1..6476: mol_type = other DNA
  regulatory 2197..2203: note = TATA Signal; regulatory_class = TATA_box
  rep_origin 822..1410
  5'UTR 2212..2255
  misc_feature 2256..2261: note = Kozak sequence
gaacaatggcgtgaagacctttgtgggcggtaactgtaccgttagcctgatgttgatgtcgctgggcggtctctttgcccataatctcgttgactgggtatccgtcgcgacctatcaggccgcctccggcggcggcgcgcgccatatgcgcgagctgttaacccagatgggtcagttgtatggccatgtcgccgatgaactggcgacgccgtcttccgcaattcttgatattgaacgcaaagttacggcattgacccgcagcggcgagctgccggttgataactttggcgtaccgctggcgggaagcctgatcccctggatcgacaaacagctcgataacggccagagccgcgaagagtggaaaggccaggcggaaaccaacaagattctcaatactgcctctgtgattccggttgatggtttgtgtgtgcgcgtcggcgcgctgcgctgtcacagccaggcgttcaccatcaagctgaaaaaagaggtatccattccgacggtggaagaactgctggcggcacataatccgtgggcgaaagtggtgccgaacgatcgtgatatcactatgcgcgaattaaccccggcggcggtgaccggcacgttgactacgccggttggtcgtctgcgtaagctgaacatggggccagagttcttgtcggcgtttaccgtaggcgaccagttgttatggggcgccgccgagccgctgcgtcgaatgctgcgccagttggcgtagttgataatctcatgaccaaaatcccttaacgtgagttttcgttccactgagcgtcagaccccgtagaaaagatcaaaggatcttcttgagatcctttttttctgcgcgtaatctgctgcttgcaaacaaaaaaaccaccgctaccagcggtggtttgtttgccggatcaagagctaccaactctttttccgaaggtaactggcttcagcagagcgcagataccaaatactgtccttctagtgtagccgtagttaggccaccacttcaagaactctgtagcaccgcctacatacctcgctctgctaatcctgttaccagtggctgctgccagtggcgataagtcgtgtcttaccgggttggactcaagacgatagttaccggataaggcgcagcggtcgggctgaacggggggttcgtgcacacagcccagcttggagcgaacgacctacaccgaactgagatacctacagcgtgagctatgagaaagcgccacgcttcccgaagggagaaaggcggacaggtatccggtaagcggcagggtcggaacaggagagcgcacgagggagcttccagggggaaacgcctggtatctttatagtcctgtcgggtttcgccacctctgacttgagcgtcgatttttgtgatgctcgtcaggggggcggagcctatggaaaaacgccagcaacgcggcctttttacggttcctggccttttgctggccttttgctcacatgttctttcctgcgttatcccctgattctgtggataaccgtattaccgcctttgagtgagctgataccgctcgccgcagccgaacgaccgagcgcagcgagtcagtgagcgaggaagcggtagagcgcccaatacgcaaaccgcctctccccgcgcgttggccgattcattaatgcagctggcacgacaggtttcccgactggaaagcgggcagtgagcgcaacgcaagtcgacccgttacataacttacggtaaatggcccgcctggctgaccgcccaacgacccccgcccattgacgtcaataatgacgtatgttcccatagtaacgccaatagggactttccattgacgtcaatgggtggagtatttacggtaaactgcccacttggcagtacatcaagtgtatcatatgccaagtacgccccctattgacgtcaatgacggtaaatggcccgcctggcattatgcccagtacatgaccttatgggactttcctacttggcagtacatctacgtattagtcatcgctattaccatggtgatgcggttttggcagtacatcaatgggcgtggatagcggtttgactcacggggatttccaagtctccaccccattgacgtcaatgggagtttgttttggcaccaaaatcaacgggactttccaaaatgtcgtaacaactccgccccattgacgcaaatgggcggtaggcgtgtacggtgggaggtctatataagcagagctggtttagtgaaccgtcttaagcgctagcgattacgccaagctcggccaccatggccttgacctttgctttactggtggccctcctggtgctcagctgcaagtcaagctgctctgtgggctgtgatctgcctcaaacccacagcctgggtagcaggaggaccttgatgctcctggcacagatgaggagaatctctcttttctcctgcttgaaggacagacatgactttggatttccccaggaggagtttggcaaccagttccaaaaggctgaaaccatccctgtcctccatgagatgatccagcagatcttcaatctcttcagcacaaaggactcatctgctgcttgggatgagaccctcctagacaaattctacactgaactctaccagcagctgaatgacctggaagcctgtgtgatacagggggtgggggtgacagagactcccctgatgaaggaggactccattctggctgtgaggaaatacttccaaagaatcactctctatctgaaagagaagaaatacagcccttgtgcctgggaggttgtcagagcagaaatcatgagatctttttctttgtcaacaaacttgcaagaaagtttaagaagtaaggaatgatgatagtggcagtttatggcgggcgtcctgcccgccaccctccagaaaacaaacccaggcgatcacagcagcagccgccgcggcagcagcaccaacagcaggaggagcaggaggagccggaggaggaggaggaggaggaggcaaagttagagttggggctggcgctccggagttgctgggctcagcgcagctcccattcattaaggaaccagctgcggaggaaggtggccgagcgcccgcgctgcccactcgctcgctcgcgcactcagacgcgcgccacaacagcgcgccccaagctgcgcagctctgcaaaagtttctgctcgggatctggctctcttccccttggactttagaacgatttagggttgacagaggaaagcagaggcgcgcaggaggagcagaaaacaccaccttctgcagttggaggcaggcagccccggctgcactctagccgccgcgcccggagccggggccgacccgccactatccgcagcagcctcggccaggaggcgacccgggcgcctgggtgtgtggctgctgttgcgggacgtcttcgcggggcgggaggctcgcgccgcagccagcgccatgaccaacaagtgtctcctccaaattgctctcctgttgtgcttctccactacagctctttccatgagctacaacttgcttggattcctacaaagaagcagcaattttcagtgtcagaagctcctgtggcaattgaatgggaggcttgaatactgcctcaaggacaggatgaactttgacatccctgaggagattaagcagctgcagcagttccagaaggaggacgccgcattgaccatctatgagatgctccagaacatctttgctattttcagacaagattcatctagcactggctggaatgagactattgttgagaacctcctggctaatgtctatcatcagataaaccatctgaagacagtcctggaagaaaaactggagaaagaagatttcaccaggggaaaactcatgagcagtctgcacctgaaaagatattatgggaggattctgcattacctgaaggccaaggagtacagtcactgtgcctggaccatagtcagagtggaaatcctaaggaacttttacttcattaacagacttacaggttacctccgaaactgaaaccggtatgttgctcggcaacggcctggtctgtgccaagtgtttgctgacgcaacccccactggctggggcttggccataggccatcagcgcatgcgtggaacctttgtggctcctctgccgatccatactgcggaactcctagccgcttgttttgctcgcagccggtctggggcaaagctcatcggaactgacaattctgtcgtcctctcgcggaaatatacatcgtttccatggctgctaggttgtactgccaactgcatccttcgcgggacgtcctttgtttacgtcccgtcggcgctgaatcccgcggacgacccctctcggggccgcttgggactctctcgtccccttctccgtctgccgttccagccgaccacggggcgcacctctctttacgcggtctccccgtctgtgccttctcatctgccggtccgtgtgcacttcgcttcacctctgcacgttgcatggagaccaccgtgaacgcccatcagatcctgcccaaggtcttacataagaggactcttggactcccagcaatgtcggcgcgccctgtgccttctagttgccagccatctgttgtttgcccctcccccgtgccttccttgaccctggaaggtgccactcccactgtcctttcctaataaaatgaggaaattgcatcgcattgtctgagtaggtgtcattctattctggggggtggggtggggcaggacagcaagggggaggattgggaagacaatagcaggcatgctggggatgcggtgggctctatggggatccgctccggctcgagttaagccagccccgacacccgccaacacccgctgacgcgccctgacgggcttgtctgctcccggcatccgcttacagacaagctgtgaccgtctccgggagctgcatgtgtcagaggttttcaccgtcatcaccgaaacgcgcgagacgaaagggcctcgtgatacgcctatttttataggttaatgtcatgataataatggtttcttagacgtcaggtggcacttttcggggaaatgtgaagctttagaaaaactcatcgagcatcaaatgaaactgcaatttattcatatcaggattatcaataccatatttttgaaaaagccgtttctgtaatgaaggagaaaactcaccgaggcagttccataggatggcaagatcctggtatcggtctgcgattccgactcgtccaacatcaatacaacctattaatttcccctcgtcaaaaataaggttatcaagtgagaaatcaccatgagtgacgactgaatccggtgagaatggcaaaagtttatgcatttctttccagacttgttcaacaggccagccattacgctcgtcatcaaaatcactcgcatcaaccaaaccgttattcattcgtgattgcgcctgagcgagacgaaatacgcgatcgctgttaaaaggacaattacaaacaggaatcgaatgcaaccggcgcaggaacactgccagcgcatcaacaatattttcacctgaatcaggatattcttctaatacctggaatgctgtttttccggggatcgcagtggtgagtaaccatgcatcatcaggagtacggataaaatgcttgatggtcggaagaggcataaattccgtcagccagtttagtctgaccatctcatctgtaacatcattggcaacgctacctttgccatgtttcagaaacaactctggcgcatcgggcttcccatacaagcgatagattgtcgcacctgattgcccgacattatcgcgagcccatttatacccatataaatcagcatccatgttggaatttaatcgcggcctcgacgtttcccgttgaatatggctcataacaccccttgtattactgtttatgtaagcagacagttttattgttcatgatgatatatttttatcttgtgcaatgtaacatcagagattttgagacacgggccagagctgcaagcttctgtcagaccaagtttactcatatatactttagattgatttaaaacttcatttttaatttaaaaggatctaggtgaagatcctttatggtgaaggatgcgccacaggatactggcgcgcatacacagcacatctctttgcaggaaaaaaacgctatgaaaaatgttggttttatcggctggcgcggaatggtcggctctgttctcatgcaacgcatggtagaggagcgcgatttcgacgctattcgccctgttttcttttctacctcccagtttggacaggcggcgcccaccttcggcgacacctccaccggcacgctacaggacgcttttgatctggatgcgctaaaagcgctcgatatcatcgtgacctgccagggcggcgattataccaacgaaatttatccaaagctgcgcgaaagcggatggcagggttactggattgatgcggcttctacgctgcgcatgaaagatgatgccattattattctcgacccggtcaaccaggacgtgattaccgacggcct

SEQ ID NO: 508 - DNA, 7310 bp, synthetic construct
  misc_feature 1..7310: note = Synthetic DNA construct
  regulatory 1704..2007: note = enhancer - CMV; regulatory_class = enhancer
  regulatory 2008..2211: note = promoter - CMV promoter; regulatory_class = promoter
  gene 2265..2822: note = huIFNb opt 13
  misc_feature 2835..3368: note = HPRE
  regulatory 3377..3601: note = polyA_signal - bGH poly(A) signal; regulatory_class = polyA_signal_sequence
  regulatory 3632..3843: note = promoter - EF-1-alpha core promoter; regulatory_class = promoter
  gene 4167..4727: note = hIFNa2 NM_000605.4 opt 13
  misc_feature 4780..5368: note = WPRE
  regulatory 5391..5512: note = polyA_signal - SV40 poly(A) signal; regulatory_class = polyA_signal_sequence
  source 1..7310: mol_type = other DNA
  regulatory 2197..2203: note = TATA signal; regulatory_class = TATA_box
  regulatory 3781..3787: note = TATA signal; regulatory_class = TATA_box
  misc_feature 2256..2261: note = Kozak sequence
  misc_difference 4158..4163: note = Kozak sequence
  rep_origin 822..1410
  5'UTR 2212..2255
  misc_feature 3602..3631: note = Promoter spacer
  misc_feature 3856..4124: note = LTR
gaacaatggcgtgaagacctttgtgggcggtaactgtaccgttagcctgatgttgatgtcgctgggcggtctctttgcccataatctcgttgactgggtatccgtcgcgacctatcaggccgcctccggcggcggcgcgcgccatatgcgcgagctgttaacccagatgggtcagttgtatggccatgtcgccgatgaactggcgacgccgtcttccgcaattcttgatattgaacgcaaagttacggcattgacccgcagcggcgagctgccggttgataactttggcgtaccgctggcgggaagcctgatcccctggatcgacaaacagctcgataacggccagagccgcgaagagtggaaaggccaggcggaaaccaacaagattctcaatactgcctctgtgattccggttgatggtttgtgtgtgcgcgtcggcgcgctgcgctgtcacagccaggcgttcaccatcaagctgaaaaaagaggtatccattccgacggtggaagaactgctggcggcacataatccgtgggcgaaagtggtgccgaacgatcgtgatatcactatgcgcgaattaaccccggcggcggtgaccggcacgttgactacgccggttggtcgtctgcgtaagctgaacatggggccagagttcttgtcggcgtttaccgtaggcgaccagttgttatggggcgccgccgagccgctgcgtcgaatgctgcgccagttggcgtagttgataatctcatgaccaaaatcccttaacgtgagttttcgttccactgagcgtcagaccccgtagaaaagatcaaaggatcttcttgagatcctttttttctgcgcgtaatctgctgcttgcaaacaaaaaaaccaccgctaccagcggtggtttgtttgccggatcaagagctaccaactctttttccgaaggtaactggcttcagcagagcgcagataccaaatactgtccttctagtgtagccgtagttaggccaccacttcaagaactctgtagcaccgcctacatacctcgctctgctaatcctgttaccagtggctgctgccagtggcgataagtcgtgtcttaccgggttggactcaagacgatagttaccggataaggcgcagcggtcgggctgaacggggggttcgtgcacacagcccagcttggagcgaacgacctacaccgaactgagatacctacagcgtgagctatgagaaagcgccacgcttcccgaagggagaaaggcggacaggtatccggtaagcggcagggtcggaacaggagagcgcacgagggagcttccagggggaaacgcctggtatctttatagtcctgtcgggtttcgccacctctgacttgagcgtcgatttttgtgatgctcgtcaggggggcggagcctatggaaaaacgccagcaacgcggcctttttacggttcctggccttttgctggccttttgctcacatgttctttcctgcgttatcccctgattctgtggataaccgtattaccgcctttgagtgagctgataccgctcgccgcagccgaacgaccgagcgcagcgagtcagtgagcgaggaagcggtagagcgcccaatacgcaaaccgcctctccccgcgcgttggccgattcattaatgcagctggcacgacaggtttcccgactggaaagcgggcagtgagcgcaacgcaagtcgacccgttacataacttacggtaaatggcccgcctggctgaccgcccaacgacccccgcccattgacgtcaataatgacgtatgttcccatagtaacgccaatagggactttccattgacgtcaatgggtggagtatttacggtaaactgcccacttggcagtacatcaagtgtatcatatgccaagtacgccccctattgacgtcaatgacggtaaatggcccgcctggcattatgcccagtacatgaccttatgggactttcctacttggcagtacatctacgtattagtcatcgctattaccatggtgatgcggttttggcagtacatcaatgggcgtggatagcggtttgactcacggggatttccaagtctccaccccattgacgtcaatgggagtttgttttggcaccaaaatcaacgggactttccaaaatgtcgtaacaactccgccccattgacgcaaatgggcggtaggcgtgtacggtgggaggtctatataagcagagctggtttagtgaaccgtcttaagcgctagcgattacgccaagctcggccaccatgaccaacaagtgcctcctccagattgcactgctgttgtgcttcagcaccaccgctctcagcatgagctacaacctcttaggattcctgcagagaagcagcaacttccagtgtcagaagctgctgtggcaattgaacggcaggctggaatactgcctgaaggaccgcatgaacttcgatatccccgaggagatcaagcagctgcagcagttccagaaggaggacgccgccctgaccatctacgagatgctgcagaacatcttcgctatcttcagacaagactcctctagcaccggctggaacgagaccattgttgagaacctgctggccaacgtctaccaccagatcaaccatctgaagaccgtgctggaggagaagctggagaaggaagacttcaccaggggcaaactgatgagctctctgcacctgaaaagatactacggcaggatcctgcactacctgaaggccaaggagtacagtcactgtgcctggaccattgtgagagtggagatcctgaggaacttctacttcatcaacagactgaccggctacctgaggaactgaaccggtatgttgctcggcaacggcctggtctgtgccaagtgtttgctgacgcaacccccactggctggggcttggccataggccatcagcgcatgcgtggaacctttgtggctcctctgccgatccatactgcggaactcctagccgcttgttttgctcgcagccggtctggggcaaagctcatcggaactgacaattctgtcgtcctctcgcggaaatatacatcgtttccatggctgctaggttgtactgccaactgcatccttcgcgggacgtcctttgtttacgtcccgtcggcgctgaatcccgcggacgacccctctcggggccgcttgggactctctcgtccccttctccgtctgccgttccagccgaccacggggcgcacctctctttacgcggtctccccgtctgtgccttctcatctgccggtccgtgtgcacttcgcttcacctctgcacgttgcatggagaccaccgtgaacgcccatcagatcctgcccaaggtcttacataagaggactcttggactcccagcaatgtcggcgcgccctgtgccttctagttgccagccatctgttgtttgcccctcccccgtgccttccttgaccctggaaggtgccactcccactgtcctttcctaataaaatgaggaaattgcatcgcattgtctgagtaggtgtcattctattctggggggtggggtggggcaggacagcaagggggaggattgggaagacaatagcaggcatgctggggatgcggtgggctctatggggatccgctccgggaattctgcccgtcagtgggcagagcgcacatcgcccacagtccccgagaagttggggggaggggtcggcaattgaacgggtgcctagagaaggtggcgcggggtaaactgggaaagtgatgtcgtgtactggctccgcctttttcccgagggtgggggagaaccgtatataagtgcagtagtcgccgtgaacgttctttttcgcaacgggtttgccgccagaacacagctgaagcttcgaggggctcgcatctctccttcacgcgcccgccgccctacctgaggccgccatccacgccggttgagtcgcgttctgccgcctcccgcctgtggtgcctcctgaactgcgtccgccgtctaggtaagtttaaagctcaggtcgagaccgggcctttgtccggcgctcccttggagcctacctagactcagccggctctccacgctttgcctgaccctgcttgctcaactctacgtctttgtttcgttttctgttctgcgccgttacagatccaagctgtgaccggcgcctacctgagatcaccggccaccatggccctgaccttcgcccttctggtggccctgctggtgctgagctgcaagtctagctgctctgtgggctgtgacctgccccaaacccacagcctgggaagcaggaggaccttgatgctgctggcccagatgaggagaatcagcctgttcagctgcctgaaggacagacacgactttggatttccccaggaggagtttggcaaccagttccaaaaggctgagaccatccccgtgctgcatgagatgatccagcagatcttcaacctgttcagcaccaaagattcaagcgctgcttgggacgagaccctgctggataagttctacactgagctgtaccagcagctgaacgacctggaggcctgcgtgattcagggcgtgggcgtgacagagacacccctgatgaaggaggacagcatcctggccgtgaggaagtacttccagagaatcaccctgtacctgaaggagaagaagtacagcccctgcgcctgggaggttgtgagagccgagatcatgcggtccttctccctgagcaccaacctgcaggagagcctgaggagcaaggagtgaggccgcgactcgcggccgcctatgtacctcctgcttacaacacgctagcaatcaacctctggattacaaaatttgtgaaagattgactggtattcttaactatgttgctccttttacgctatgtggatacgctgctttaatgcctttgtatcatgctattgcttcccgtatggctttcattttctcctccttgtataaatcctggttgctgtctctttatgaggagttgtggcccgttgtcaggcaacgtggcgtggtgtgcactgtgtttgctgacgcaacccccactggttggggcattgccaccacctgtcagctcctttccgggactttcgctttccccctccctattgccacggcggaactcatcgccgcctgccttgcccgctgctggacaggggctcggctgttgggcactgacaattccgtggtgttgtcggggaagctgacgtcctttccatggctgctcgcctgtgttgccacctggattctgcgcgggacgtccttctgctacgtcccttcggccctcaatccagcggaccttccttcccgcggcctgctgccggctctgcggcctcttccgcgtcttcgccttcgccctcagacgagtcggatctccctttgggccgcctccccgcctggctagctggccagacatgataagatacattgatgagtttggacaaaccacaactagaatgcagtgaaaaaaatgctttatttgtgaaatttgtgatgctattgctttatttgtaaccattataagctgcaataaacaagttaacaacaacaattgcattcattttatgtttcaggttcagggggaggtgtgggaggttttttaaagcaagtaaaacctctacaaatgtggtatggctcgagttaagccagccccgacacccgccaacacccgctgacgcgccctgacgggcttgtctgctcccggcatccgcttacagacaagctgtgaccgtctccgggagctgcatgtgtcagaggttttcaccgtcatcaccgaaacgcgcgagacgaaagggcctcgtgatacgcctatttttataggttaatgtcatgataataatggtttcttagacgtcaggtggcacttttcggggaaatgtgaagctttagaaaaactcatcgagcatcaaatgaaactgcaatttattcatatcaggattatcaataccatatttttgaaaaagccgtttctgtaatgaaggagaaaactcaccgaggcagttccataggatggcaagatcctggtatcggtctgcgattccgactcgtccaacatcaatacaacctattaatttcccctcgtcaaaaataaggttatcaagtgagaaatcaccatgagtgacgactgaatccggtgagaatggcaaaagtttatgcatttctttccagacttgttcaacaggccagccattacgctcgtcatcaaaatcactcgcatcaaccaaaccgttattcattcgtgattgcgcctgagcgagacgaaatacgcgatcgctgttaaaaggacaattacaaacaggaatcgaatgcaaccggcgcaggaacactgccagcgcatcaacaatattttcacctgaatcaggatattcttctaatacctggaatgctgtttttccggggatcgcagtggtgagtaaccatgcatcatcaggagtacggataaaatgcttgatggtcggaagaggcataaattccgtcagccagtttagtctgaccatctcatctgtaacatcattggcaacgctacctttgccatgtttcagaaacaactctggcgcatcgggcttcccatacaagcgatagattgtcgcacctgattgcccgacattatcgcgagcccatttatacccatataaatcagcatccatgttggaatttaatcgcggcctcgacgtttcccgttgaatatggctcataacaccccttgtattactgtttatgtaagcagacagttttattgttcatgatgatatatttttatcttgtgcaatgtaacatcagagattttgagacacgggccagagctgcaagcttctgtcagaccaagtttactcatatatactttagattgatttaaaacttcatttttaatttaaaaggatctaggtgaagatcctttatggtgaaggatgcgccacaggatactggcgcgcatacacagcacatctctttgcaggaaaaaaacgctatgaaaaatgttggttttatcggctggcgcggaatggtcggctctgttctcatgcaacgcatggtagaggagcgcgatttcgacgctattcgccctgttttcttttctacctcccagtttggacaggcggcgcccaccttcggcgacacctccaccggcacgctacaggacgcttttgatctggatgcgctaaaagcgctcgatatcatcgtgacctgccagggcggcgattataccaacgaaatttatccaaagctgcgcgaaagcggatggcagggttactggattgatgcggcttctacgctgcgcatgaaagatgatgccattattattctcgacccggtcaaccaggacgtgattaccgacggcct

SEQ ID NO: 509 - DNA, 7310 bp, synthetic construct
  misc_feature 1..7310: note = Synthetic DNA construct
  regulatory 1704..2007: note = enhancer - CMV; regulatory_class = enhancer
  regulatory 2008..2211: note = promoter - CMV promoter; regulatory_class = promoter
  gene 2265..2822: note = huIFNb
  misc_feature 2835..3368: note = HPRE
  regulatory 3377..3601: note = polyA_signal - bGH poly(A) signal; regulatory_class = polyA_signal_sequence
  regulatory 3632..3843: note = promoter - EF-1-alpha core promoter; regulatory_class = promoter
  gene 4167..4727: note = hIFNa2 NM_000605.4
  misc_feature 4780..5368: note = WPRE
  regulatory 5391..5512: note = polyA_signal - SV40 poly(A) signal; regulatory_class = polyA_signal_sequence
  source 1..7310: mol_type = other DNA
  rep_origin 822..1410
  regulatory 2197..2203: note = TATA signal; regulatory_class = TATA_box
  regulatory 3781..3787: note = TATA signal; regulatory_class = TATA_box
  misc_feature 2256..2261: note = Kozak sequence
  misc_feature 4158..4163: note = Kozak sequence
  5'UTR 2212..2255
  misc_feature 3602..3631: note = Promoter spacer
  misc_feature 3856..4124: note = LTR
gaacaatggcgtgaagacctttgtgggcggtaactgtaccgttagcctgatgttgatgtcgctgggcggtctctttgcccataatctcgttgactgggtatccgtcgcgacctatcaggccgcctccggcggcggcgcgcgccatatgcgcgagctgttaacccagatgggtcagttgtatggccatgtcgccgatgaactggcgacgccgtcttccgcaattcttgatattgaacgcaaagttacggcattgacccgcagcggcgagctgccggttgataactttggcgtaccgctggcgggaagcctgatcccctggatcgacaaacagctcgataacggccagagccgcgaagagtggaaaggccaggcggaaaccaacaagattctcaatactgcctctgtgattccggttgatggtttgtgtgtgcgcgtcggcgcgctgcgctgtcacagccaggcgttcaccatcaagctgaaaaaagaggtatccattccgacggtggaagaactgctggcggcacataatccgtgggcgaaagtggtgccgaacgatcgtgatatcactatgcgcgaattaaccccggcggcggtgaccggcacgttgactacgccggttggtcgtctgcgtaagctgaacatggggccagagttcttgtcggcgtttaccgtaggcgaccagttgttatggggcgccgccgagccgctgcgtcgaatgctgcgccagttggcgtagttgataatctcatgaccaaaatcccttaacgtgagttttcgttccactgagcgtcagaccccgtagaaaagatcaaaggatcttcttgagatcctttttttctgcgcgtaatctgctgcttgcaaacaaaaaaaccaccgctaccagcggtggtttgtttgccggatcaagagctaccaactctttttccgaaggtaactggcttcagcagagcgcagataccaaatactgtccttctagtgtagccgtagttaggccaccacttcaagaactctgtagcaccgcctacatacctcgctctgctaatcctgttaccagtggctgctgccagtggcgataagtcgtgtcttaccgggttggactcaagacgatagttaccggataaggcgcagcggtcgggctgaacggggggttcgtgcacacagcccagcttggagcgaacgacctacaccgaactgagatacctacagcgtgagctatgagaaagcgccacgcttcccgaagggagaaaggcggacaggtatccggtaagcggcagggtcggaacaggagagcgcacgagggagcttccagggggaaacgcctggtatctttatagtcctgtcgggtttcgccacctctgacttgagcgtcgatttttgtgatgctcgtcaggggggcggagcctatggaaaaacgccagcaacgcggcctttttacggttcctggccttttgctggccttttgctcacatgttctttcctgcgttatcccctgattctgtggataaccgtattaccgcctttgagtgagctgataccgctcgccgcagccgaacgaccgagcgcagcgagtcagtgagcgaggaagcggtagagcgcccaatacgcaaaccgcctctccccgcgcgttggccgattcattaatgcagctggcacgacaggtttcccgactggaaagcgggcagtgagcgcaacgcaagtcgacccgttacataacttacggtaaatggcccgcctggctgaccgcccaacgacccccgcccattgacgtcaataatgacgtatgttcccatagtaacgccaatagggactttccattgacgtcaatgggtggagtatttacggtaaactgcccacttggcagtacatcaagtgtatcatatgccaagtacgccccctattgacgtcaatgacggtaaatggcccgcctggcattatgcccagtacatgaccttatgggactttcctacttggcagtacatctacgtattagtcatcgctattaccatggtgatgcggttttggcagtacatcaatgggcgtggatagcggtttgactcacggggatttccaagtctccaccccattgacgtcaatgggagtttgttttggcaccaaaatcaacgggactttccaaaatgtcgtaacaactccgccccattgacgcaaatgggcggtaggcgtgtacggtgggaggtctatataagcagagctggtttagtgaaccgtcttaagcgctagcgattacgccaagctcggccaccatgaccaacaagtgtctcctccaaattgctctcctgttgtgcttctccactacagctctttccatgagctacaacttgcttggattcctacaaagaagcagcaattttcagtgtcagaagctcctgtggcaattgaatgggaggcttgaatactgcctcaaggacaggatgaactttgacatccctgaggagattaagcagctgcagcagttccagaaggaggacgccgcattgaccatctatgagatgctccagaacatctttgctattttcagacaagattcatctagcactggctggaatgagactattgttgagaacctcctggctaatgtctatcatcagataaaccatctgaagacagtcctggaagaaaaactggagaaagaagatttcaccaggggaaaactcatgagcagtctgcacctgaaaagatattatgggaggattctgcattacctgaaggccaaggagtacagtcactgtgcctggaccatagtcagagtggaaatcctaaggaacttttacttcattaacagacttacaggttacctccgaaactgaaccggtatgttgctcggcaacggcctggtctgtgccaagtgtttgctgacgcaacccccactggctggggcttggccataggccatcagcgcatgcgtggaacctttgtggctcctctgccgatccatactgcggaactcctagccgcttgttttgctcgcagccggtctggggcaaagctcatcggaactgacaattctgtcgtcctctcgcggaaatatacatcgtttccatggctgctaggttgtactgccaactgcatccttcgcgggacgtcctttgtttacgtcccgtcggcgctgaatcccgcggacgacccctctcggggccgcttgggactctctcgtccccttctccgtctgccgttccagccgaccacggggcgcacctctctttacgcggtctccccgtctgtgccttctcatctgccggtccgtgtgcacttcgcttcacctctgcacgttgcatggagaccaccgtgaacgcccatcagatcctgcccaaggtcttacataagaggactcttggactcccagcaatgtcggcgcgccctgtgccttctagttgccagccatctgttgtttgcccctcccccgtgccttccttgaccctggaaggtgccactcccactgtcctttcctaataaaatgaggaaattgcatcgcattgtctgagtaggtgtcattctattctggggggtggggtggggcaggacagcaagggggaggattgggaagacaatagcaggcatgctggggatgcggtgggctctatggggatccgctccgggaattctgcccgtcagtgggcagagcgcacatcgcccacagtccccgagaagttggggggaggggtcggcaattgaacgggtgcctagagaaggtggcgcggggtaaactgggaaagtgatgtcgtgtactggctccgcctttttcccgagggtgggggagaaccgtatataagtgcagtagtcgccgtgaacgttctttttcgcaacgggtttgccgccagaacacagctgaagcttcgaggggctcgcatctctccttcacgcgcccgccgccctacctgaggccgccatccacgccggttgagtcgcgttctgccgcctcccgcctgtggtgcctcctgaactgcgtccgccgtctaggtaagtttaaagctcaggtcgagaccgggcctttgtccggcgctcccttggagcctacctagactcagccggctctccacgctttgcctgaccctgcttgctcaactctacgtctttgtttcgttttctgttctgcgccgttacagatccaagctgtgaccggcgcctacctgagatcaccggccaccatggccttgacctttgctttactggtggccctcctggtgctcagctgcaagtcaagctgctctgtgggctgtgatctgcctcaaacccacagcctgggtagcaggaggaccttgatgctcctggcacagatgaggagaatctctcttttctcctgcttgaaggacagacatgactttggatttccccaggaggagtttggcaaccagttccaaaaggctgaaaccatccctgtcctccatgagatgatccagcagatcttcaatctcttcagcacaaaggactcatctgctgcttgggatgagaccctcctagacaaattctacactgaactctaccagcagctgaatgacctggaagcctgtgtgatacagggggtgggggtgacagagactcccctgatgaaggaggactccattctggctgtgaggaaatacttccaaagaatcactctctatctgaaagagaagaaatacagcccttgtgcctgggaggttgtcagagcagaaatcatgagatctttttctttgtcaacaaacttgcaagaaagtttaagaagtaaggaatgaggccgcgactcgcggccgcctatgtacctcctgcttacaacacgctagcaatcaacctctggattacaaaatttgtgaaagattgactggtattcttaactatgttgctccttttacgctatgtggatacgctgctttaatgcctttgtatcatgctattgcttcccgtatggctttcattttctcctccttgtataaatcctggttgctgtctctttatgaggagttgtggcccgttgtcaggcaacgtggcgtggtgtgcactgtgtttgctgacgcaacccccactggttggggcattgccaccacctgtcagctcctttccgggactttcgctttccccctccctattgccacggcggaactcatcgccgcctgccttgcccgctgctggacaggggctcggctgttgggcactgacaattccgtggtgttgtcggggaagctgacgtcctttccatggctgctcgcctgtgttgccacctggattctgcgcgggacgtccttctgctacgtcccttcggccctcaatccagcggaccttccttcccgcggcctgctgccggctctgcggcctcttccgcgtcttcgccttcgccctcagacgagtcggatctccctttgggccgcctccccgcctggctagctggccagacatgataagatacattgatgagtttggacaaaccacaactagaatgcagtgaaaaaaatgctttatttgtgaaatttgtgatgctattgctttatttgtaaccattataagctgcaataaacaagttaacaacaacaattgcattcattttatgtttcaggttcagggggaggtgtgggaggttttttaaagcaagtaaaacctctacaaatgtggtatggctcgagttaagccagccccgacacccgccaacacccgctgacgcgccctgacgggcttgtctgctcccggcatccgcttacagacaagctgtgaccgtctccgggagctgcatgtgtcagaggttttcaccgtcatcaccgaaacgcgcgagacgaaagggcctcgtgatacgcctatttttataggttaatgtcatgataataatggtttcttagacgtcaggtggcacttttcggggaaatgtgaagctttagaaaaactcatcgagcatcaaatgaaactgcaatttattcatatcaggattatcaataccatatttttgaaaaagccgtttctgtaatgaaggagaaaactcaccgaggcagttccataggatggcaagatcctggtatcggtctgcgattccgactcgtccaacatcaatacaacctattaatttcccctcgtcaaaaataaggttatcaagtgagaaatcaccatgagtgacgactgaatccggtgagaatggcaaaagtttatgcatttctttccagacttgttcaacaggccagccattacgctcgtcatcaaaatcactcgcatcaaccaaaccgttattcattcgtgattgcgcctgagcgagacgaaatacgcgatcgctgttaaaaggacaattacaaacaggaatcgaatgcaaccggcgcaggaacactgccagcgcatcaacaatattttcacctgaatcaggatattcttctaatacctggaatgctgtttttccggggatcgcagtggtgagtaaccatgcatcatcaggagtacggataaaatgcttgatggtcggaagaggcataaattccgtcagccagtttagtctgaccatctcatctgtaacatcattggcaacgctacctttgccatgtttcagaaacaactctggcgcatcgggcttcccatacaagcgatagattgtcgcacctgattgcccgacattatcgcgagcccatttatacccatataaatcagcatccatgttggaatttaatcgcggcctcgacgtttcccgttgaatatggctcataacaccccttgtattactgtttatgtaagcagacagttttattgttcatgatgatatatttttatcttgtgcaatgtaacatcagagattttgagacacgggccagagctgcaagcttctgtcagaccaagtttactcatatatactttagattgatttaaaacttcatttttaatttaaaaggatctaggtgaagatcctttatggtgaaggatgcgccacaggatactggcgcgcatacacagcacatctctttgcaggaaaaaaacgctatgaaaaatgttggttttatcggctggcgcggaatggtcggctctgttctcatgcaacgcatggtagaggagcgcgatttcgacgctattcgccctgttttcttttctacctcccagtttggacaggcggcgcccaccttcggcgacacctccaccggcacgctacaggacgcttttgatctggatgcgctaaaagcgctcgatatcatcgtgacctgccagggcggcgattataccaacgaaatttatccaaagctgcgcgaaagcggatggcagggttactggattgatgcggcttctacgctgcgcatgaaagatgatgccattattattctcgacccggtcaaccaggacgtgattaccgacggcct

SEQ ID NO: 510 - DNA, 5943 bp, synthetic construct
  misc_feature 1..5943: note = Synthetic DNA construct
  regulatory 1704..2007: note = enhancer - CMV; regulatory_class = enhancer
  regulatory 2008..2211: note = promoter - CMV promoter; regulatory_class = promoter
  gene 2265..2822: note = huIFNb opt 2
  misc_feature 2823..2831: note = GSG linker opt 2
  gene 2832..2885: note = T2A opt 2
  gene 2886..3446: note = hIFNa2 NM_000605.4 opt 2
  misc_feature 3460..3993: note = HPRE
  regulatory 4002..4226: note = polyA_signal - bGH poly(A) signal; regulatory_class = polyA_signal_sequence
  misc_feature 4205..4284: note = Duplexed DNA insert
  source 1..5943: mol_type = other DNA
  rep_origin 822..1410
  regulatory 2197..2203: note = TATA signal; regulatory_class = TATA_box
  misc_feature 2256..2261: note = Kozak sequence
  5'UTR 2212..2255
gaacaatggcgtgaagacctttgtgggcggtaactgtaccgttagcctgatgttgatgtcgctgggcggtctctttgcccataatctcgttgactgggtatccgtcgcgacctatcaggccgcctccggcggcggcgcgcgccatatgcgcgagctgttaacccagatgggtcagttgtatggccatgtcgccgatgaactggcgacgccgtcttccgcaattcttgatattgaacgcaaagttacggcattgacccgcagcggcgagctgccggttgataactttggcgtaccgctggcgggaagcctgatcccctggatcgacaaacagctcgataacggccagagccgcgaagagtggaaaggccaggcggaaaccaacaagattctcaatactgcctctgtgattccggttgatggtttgtgtgtgcgcgtcggcgcgctgcgctgtcacagccaggcgttcaccatcaagctgaaaaaagaggtatccattccgacggtggaagaactgctggcggcacataatccgtgggcgaaagtggtgccgaacgatcgtgatatcactatgcgcgaattaaccccggcggcggtgaccggcacgttgactacgccggttggtcgtctgcgtaagctgaacatggggccagagttcttgtcggcgtttaccgtaggcgaccagttgttatggggcgccgccgagccgctgcgtcgaatgctgcgccagttggcgtagttgataatctcatgaccaaaatcccttaacgtgagttttcgttccactgagcgtcagaccccgtagaaaagatcaaaggatcttcttgagatcctttttttctgcgcgtaatctgctgcttgcaaacaaaaaaaccaccgctaccagcggtggtttgtttgccggatcaagagctaccaactctttttccgaaggtaactggcttcagcagagcgcagataccaaatactgtccttctagtgtagccgtagttaggccaccacttcaagaactctgtagcaccgcctacatacctcgctctgctaatcctgttaccagtggctgctgccagtggcgataagtcgtgtcttaccgggttggactcaagacgatagttaccggataaggcgcagcggtcgggctgaacggggggttcgtgcacacagcccagcttggagcgaacgacctacaccgaactgagatacctacagcgtgagctatgagaaagcgccacgcttcccgaagggagaaaggcggacaggtatccggtaagcggcagggtcggaacaggagagcgcacgagggagcttccagggggaaacgcctggtatctttatagtcctgtcgggtttcgccacctctgacttgagcgtcgatttttgtgatgctcgtcaggggggcggagcctatggaaaaacgccagcaacgcggcctttttacggttcctggccttttgctggccttttgctcacatgttctttcctgcgttatcccctgattctgtggataaccgtattaccgcctttgagtgagctgataccgctcgccgcagccgaacgaccgagcgcagcgagtcagtgagcgaggaagcggtagagcgcccaatacgcaaaccgcctctccccgcgcgttggccgattcattaatgcagctggcacgacaggtttcccgactggaaagcgggcagtgagcgcaacgcaagtcgacccgttacataacttacggtaaatggcccgcctggctgaccgcccaacgacccccgcccattgacgtcaataatgacgtatgttcccatagtaacgccaatagggactttccattgacgtcaatgggtggagtatttacggtaaactgcccacttggcagtacatcaagtgtatcatatgccaagtacgccccctattgacgtcaatgacggtaaatggcccgcctggcattatgcccagtacatgaccttatgggactttcctacttggcagtacatctacgtattagtcatcgctattaccatggtgatgcggttttggcagtacatcaatgggcgtggatagcggtttgactcacggggatttccaagtctccaccccattgacgtcaatgggagtttgttttggcaccaaaatcaacgggactttccaaaatgtcgtaacaactccgccccattgacgcaaatgggcggtaggcgtgtacggtgggaggtctatataagcagagctggtttagtgaaccgtcttaagcgctagcgattacgccaagctcggccaccatgaccaacaagtgtctgctccaaattgcgctcctgttgtgcttcagcaccaccgccctgagcatgagctacaatctgcttggattcttgcaaagaagcagcaattttcagtgccagaagctgctgtggcaactgaacggcaggcttgaatactgcctcaaggacaggatgaacttcgacatccccgaggagatcaagcagctgcagcagttccagaaggaggacgccgccctgaccatctacgagatgctgcagaacatctttgccatctttagacaggattcctcaagcaccggctggaacgagaccattgttgagaacctgctggccaacgtgtaccaccagatcaaccatctgaagaccgtgctggaggagaagctggagaaggaggacttcaccaggggaaaactgatgagctctctgcacctgaaaagatactacggcaggatcctgcactacctgaaggccaaggagtacagtcactgtgcctggaccatagtgagagtggagatcctgaggaacttctacttcatcaacagactgaccggctacctgaggaacggctctggcgagggtagaggctcgttactgacatgcggcgatgtcgaggagaacccgggacctgccttgacctttgctttgctggtggccctcctggtgctcagctgcaagtcaagctgctctgtgggctgtgacctgcctcaaacccacagcctgggtagcaggaggaccctcatgctcctggctcagatgaggagaatctccctcttcagctgcctgaaggacagacacgacttcggatttccccaggaggagtttggcaaccagttccaaaaggctgagaccatccccgtgctgcatgagatgatccagcagatcttcaacctgtttagcacaaaggatagcagcgccgcttgggatgagaccctgctggataaattctacaccgaactgtaccagcagctgaacgacctggaggcctgcgtgattcagggcgtgggcgtgacagagacacccctgatgaaggaggacagcatcctggccgtgaggaagtacttccagagaatcaccctgtacctgaaggagaagaagtacagcccctgcgcctgggaggttgtgagagccgagatcatgagatccttcagcctgagcaccaacctgcaggagagcctgagaagcaaggagtgaaaccggtatgttgctcggcaacggcctggtctgtgccaagtgtttgctgacgcaacccccactggctggggcttggccataggccatcagcgcatgcgtggaacctttgtggctcctctgccgatccatactgcggaactcctagccgcttgttttgctcgcagccggtctggggcaaagctcatcggaactgacaattctgtcgtcctctcgcggaaatatacatcgtttccatggctgctaggttgtactgccaactgcatccttcgcgggacgtcctttgtttacgtcccgtcggcgctgaatcccgcggacgacccctctcggggccgcttgggactctctcgtccccttctccgtctgccgttccagccgaccacggggcgcacctctctttacgcggtctccccgtctgtgccttctcatctgccggtccgtgtgcacttcgcttcacctctgcacgttgcatggagaccaccgtgaacgcccatcagatcctgcccaaggtcttacataagaggactcttggactcccagcaatgtcggcgcgccctgtgccttctagttgccagccatctgttgtttgcccctcccccgtgccttccttgaccctggaaggtgccactcccactgtcctttcctaataaaatgaggaaattgcatcgcattgtctgagtaggtgtcattctattctggggggtggggtggggcaggacagcaagggggaggattgggaagacaatagcaggcatgctggggatgcggtgggctctatggggatccgctccggctcgagttaagccagccccgacacccgccaacacccgctgacgcgccctgacgggcttgtctgctcccggcatccgcttacagacaagctgtgaccgtctccgggagctgcatgtgtcagaggttttcaccgtcatcaccgaaacgcgcgagacgaaagggcctcgtgatacgcctatttttataggttaatgtcatgataataatggtttcttagacgtcaggtggcacttttcggggaaatgtgaagctttagaaaaactcatcgagcatcaaatgaaactgcaatttattcatatcaggattatcaataccatatttttgaaaaagccgtttctgtaatgaaggagaaaactcaccgaggcagttccataggatggcaagatcctggtatcggtctgcgattccgactcgtccaacatcaatacaacctattaatttcccctcgtcaaaaataaggttatcaagtgagaaatcaccatgagtgacgactgaatccggtgagaatggcaaaagtttatgcatttctttccagacttgttcaacaggccagccattacgctcgtcatcaaaatcactcgcatcaaccaaaccgttattcattcgtgattgcgcctgagcgagacgaaatacgcgatcgctgttaaaaggacaattacaaacaggaatcgaatgcaaccggcgcaggaacactgccagcgcatcaacaatattttcacctgaatcaggatattcttctaatacctggaatgctgtttttccggggatcgcagtggtgagtaaccatgcatcatcaggagtacggataaaatgcttgatggtcggaagaggcataaattccgtcagccagtttagtctgaccatctcatctgtaacatcattggcaacgctacctttgccatgtttcagaaacaactctggcgcatcgggcttcccatacaagcgatagattgtcgcacctgattgcccgacattatcgcgagcccatttatacccatataaatcagcatccatgttggaatttaatcgcggcctcgacgtttcccgttgaatatggctcataacaccccttgtattactgtttatgtaagcagacagttttattgttcatgatgatatatttttatcttgtgcaatgtaacatcagagattttgagacacgggccagagctgcaagcttctgtcagaccaagtttactcatatatactttagattgatttaaaacttcatttttaatttaaaaggatctaggtgaagatcctttatggtgaaggatgcgccacaggatactggcgcgcatacacagcacatctctttgcaggaaaaaaacgctatgaaaaatgttggttttatcggctggcgcggaatggtcggctctgttctcatgcaacgcatggtagaggagcgcgatttcgacgctattcgccctgttttcttttctacctcccagtttggacaggcggcgcccaccttcggcgacacctccaccggcacgctacaggacgcttttgatctggatgcgctaaaagcgctcgatatcatcgtgacctgccagggcggcgattataccaacgaaatttatccaaagctgcgcgaaagcggatggcagggttactggattgatgcggcttctacgctgcgcatgaaagatgatgccattattattctcgacccggtcaaccaggacgtgattaccgacggcct

SEQ ID NO: 511 - DNA, 5943 bp, synthetic construct
  misc_feature 1..5943: note = Synthetic DNA construct
  regulatory 1704..2007: note = enhancer - CMV; regulatory_class = enhancer
  regulatory 2008..2211: note = promoter - CMV promoter; regulatory_class = promoter
  gene 2265..2822: note = huIFNb
  misc_feature 2823..2831: note = GGS Linker
  gene 2832..2885: note = T2A
  gene 2886..3446: note = hIFNa2 NM_000605.4
  misc_feature 3460..3993: note = HPRE
  regulatory 4002..4226: note = polyA_signal - bGH poly(A) signal; regulatory_class = polyA_signal_sequence
  misc_feature 4205..4284: note = Duplexed DNA insert
  source 1..5943: mol_type = other DNA
  misc_feature 2256..2261: note = Kozak sequence
  regulatory 2197..2203: note = TATA signal; regulatory_class = TATA_box
  rep_origin 822..1410
  5'UTR 2212..2255
gaacaatggcgtgaagacctttgtgggcggtaactgtaccgttagcctgatgttgatgtcgctgggcggtctctttgcccataatctcgttgactgggtatccgtcgcgacctatcaggccgcctccggcggcggcgcgcgccatatgcgcgagctgttaacccagatgggtcagttgtatggccatgtcgccgatgaactggcgacgccgtcttccgcaattcttgatattgaacgcaaagttacggcattgacccgcagcggcgagctgccggttgataactttggcgtaccgctggcgggaagcctgatcccctggatcgacaaacagctcgataacggccagagccgcgaagagtggaaaggccaggcggaaaccaacaagattctcaatactgcctctgtgattccggttgatggtttgtgtgtgcgcgtcggcgcgctgcgctgtcacagccaggcgttcaccatcaagctgaaaaaagaggtatccattccgacggtggaagaactgctggcggcacataatccgtgggcgaaagtggtgccgaacgatcgtgatatcactatgcgcgaattaaccccggcggcggtgaccggcacgttgactacgccggttggtcgtctgcgtaagctgaacatggggccagagttcttgtcggcgtttaccgtaggcgaccagttgttatggggcgccgccgagccgctgcgtcgaatgctgcgccagttggcgtagttgataatctcatgaccaaaatcccttaacgtgagttttcgttccactgagcgtcagaccccgtagaaaagatcaaaggatcttcttgagatcctttttttctgcgcgtaatctgctgcttgcaaacaaaaaaaccaccgctaccagcggtggtttgtttgccggatcaagagctaccaactctttttccgaaggtaactggcttcagcagagcgcagataccaaatactgtccttctagtgtagccgtagttaggccaccacttcaagaactctgtagcaccgcctacatacctcgctctgctaatcctgttaccagtggctgctgccagtggcgataagtcgtgtcttaccgggttggactcaagacgatagttaccggataaggcgcagcggtcgggctgaacggggggttcgtgcacacagcccagcttggagcgaacgacctacaccgaactgagatacctacagcgtgagctatgagaaagcgccacgcttcccgaagggagaaaggcggacaggtatccggtaagcggcagggtcggaacaggagagcgcacgagggagcttccagggggaaacgcctggtatctttatagtcctgtcgggtttcgccacctctgacttgagcgtcgatttttgtgatgctcgtcaggggggcggagcctatggaaaaacgccagcaacgcggcctttttacggttcctggccttttgctggccttttgctcacatgttctttcctgcgttatcccctgattctgtggataaccgtattaccgcctttgagtgagctgataccgctcgccgcagccgaacgaccgagcgcagcgagtcagtgagcgaggaagcggtagagcgcccaatacgcaaaccgcctctccccgcgcgttggccgattcattaatgcagctggcacgacaggtttcccgactggaaagcgggcagtgagcgcaacgcaagtcgacccgttacataacttacggtaaatggcccgcctggctgaccgcccaacgacccccgcccattgacgtcaataatgacgtatgttcccatagtaacgccaatagggactttccattgacgtcaatgggtggagtatttacggtaaactgcccacttggcagtacatcaagtgtatcatatgccaagtacgccccctattgacgtcaatgacggtaaatggcccgcctggcattatgcccagtacatgaccttatgggactttcctacttggcagtacatctacgtattagtcatcgctattaccatggtgatgcggttttggcagtacatcaatgggcgtggatagcggtttgactcacggggatttccaagtctccaccccattgacgtcaatgggagtttgttttggcaccaaaatcaacgggactttccaaaatgtcgtaacaactccgccccattgacgcaaatgggcggtaggcgtgtacggtgggaggtctatataagcagagctggtttagtgaaccgtcttaagcgctagcgattacgccaagctcggccaccatgaccaacaagtgtctcctccaaattgctctcctgttgtgcttctccactacagctctttccatgagctacaacttgcttggattcctacaaagaagcagcaattttcagtgtcagaagctcctgtggcaattgaatgggaggcttgaatactgcctcaaggacaggatgaactttgacatccctgaggagattaagcagctgcagcagttccagaaggaggacgccgcattgaccatctatgagatgctccagaacatctttgctattttcagacaagattcatctagcactggctggaatgagactattgttgagaacctcctggctaatgtctatcatcagataaaccatctgaagacagtcctggaagaaaaactggagaaagaagatttcaccaggggaaaactcatgagcagtctgcacctgaaaagatattatgggaggattctgcattacctgaaggccaaggagtacagtcactgtgcctggaccatagtcagagtggaaatcctaaggaacttttacttcattaacagacttacaggttacctccgaaacggatcaggcgagggaagaggctcgcttctgacttgcggcgatgtcgaggaaaacccgggacctgccttgacctttgctttactggtggccctcctggtgctcagctgcaagtcaagctgctctgtgggctgtgatctgcctcaaacccacagcctgggtagcaggaggaccttgatgctcctggcacagatgaggagaatctctcttttctcctgcttgaaggacagacatgactttggatttccccaggaggagtttggcaaccagttccaaaaggctgaaaccatccctgtcctccatgagatgatccagcagatcttcaatctcttcagcacaaaggactcatctgctgcttgggatgagaccctcctagacaaattctacactgaactctaccagcagctgaatgacctggaagcctgtgtgatacagggggtgggggtgacagagactcccctgatgaaggaggactccattctggctgtgaggaaatacttccaaagaatcactctctatctgaaagagaagaaatacagcccttgtgcctgggaggttgtcagagcagaaatcatgagatctttttctttgtcaacaaacttgcaagaaagtttaagaagtaaggaatgaaaccggtatgttgctcggcaacggcctggtctgtgccaagtgtttgctgacgcaacccccactggctggggcttggccataggccatcagcgcatgcgtggaacctttgtggctcctctgccgatccatactgcggaactcctagccgcttgttttgctcgcagccggtctggggcaaagctcatcggaactgacaattctgtcgtcctctcgcggaaatatacatcgtttccatggctgctaggttgtactgccaactgcatccttcgcgggacgtcctttgtttacgtcccgtcggcgctgaatcccgcggacgacccctctcggggccgcttgggactctctcgtccccttctccgtctgccgttccagccgaccacggggcgcacctctctttacgcggtctccccgtctgtgccttctcatctgccggtccgtgtgcacttcgcttcacctctgcacgttgcatggagaccaccgtgaacgcccatcagatcctgcccaaggtcttacataagaggactcttggactcccagcaatgtcggcgcgccctgtgccttctagttgccagccatctgttgtttgcccctcccccgtgccttccttgaccctggaaggtgccactcccactgtcctttcctaataaaatgaggaaattgcatcgcattgtctgagtaggtgtcattctattctggggggtggggtggggcaggacagcaagggggaggattgggaagacaatagcaggcatgctggggatgcggtgggctctatggggatccgctccggctcgagttaagccagccccgacacccgccaacacccgctgacgcgccctgacgggcttgtctgctcccggcatccgcttacagacaagctgtgaccgtctccgggagctgcatgtgtcagaggttttcaccgtcatcaccgaaacgcgcgagacgaaagggcctcgtgatacgcctatttttataggttaatgtcatgataataatggtttcttagacgtcaggtggcacttttcggggaaatgtgaagctttagaaaaactcatcgagcatcaaatgaaactgcaatttattcatatcaggattatcaataccatatttttgaaaaagccgtttctgtaatgaaggagaaaactcaccgaggcagttccataggatggcaagatcctggtatcggtctgcgattccgactcgtccaacatcaatacaacctattaatttcccctcgtcaaaaataaggttatcaagtgagaaatcaccatgagtgacgactgaatccggtgagaatggcaaaagtttatgcatttctttccagacttgttcaacaggccagccattacgctcgtcatcaaaatcactcgcatcaaccaaaccgttattcattcgtgattgcgcctgagcgagacgaaatacgcgatcgctgttaaaaggacaattacaaacaggaatcgaatgcaaccggcgcaggaacactgccagcgcatcaacaatattttcacctgaatcaggatattcttctaatacctggaatgctgtttttccggggatcgcagtggtgagtaaccatgcatcatcaggagtacggataaaatgcttgatggtcggaagaggcataaattccgtcagccagtttagtctgaccatctcatctgtaacatcattggcaacgctacctttgccatgtttcagaaacaactctggcgcatcgggcttcccatacaagcgatagattgtcgcacctgattgcccgacattatcgcgagcccatttatacccatataaatcagcatccatgttggaatttaatcgcggcctcgacgtttcccgttgaatatggctcataacaccccttgtattactgtttatgtaagcagacagttttattgttcatgatgatatatttttatcttgtgcaatgtaacatcagagattttgagacacgggccagagctgcaagcttctgtcagaccaagtttactcatatatactttagattgatttaaaacttcatttttaatttaaaaggatctaggtgaagatcctttatggtgaaggatgcgccacaggatactggcgcgcatacacagcacatctctttgcaggaaaaaaacgctatgaaaaatgttggttttatcggctggcgcggaatggtcggctctgttctcatgcaacgcatggtagaggagcgcgatttcgacgctattcgccctgttttcttttctacctcccagtttggacaggcggcgcccaccttcggcgacacctccaccggcacgctacaggacgcttttgatctggatgcgctaaaagcgctcgatatcatcgtgacctgccagggcggcgattataccaacgaaatttatccaaagctgcgcgaaagcggatggcagggttactggattgatgcggcttctacgctgcgcatgaaagatgatgccattattattctcgacccggtcaaccaggacgtgattaccgacggcct

SEQ ID NO: 512 - DNA, 6476 bp, synthetic construct
  misc_feature 1..6476: note = Synthetic DNA construct
  regulatory 1704..2007: note = enhancer - CMV; regulatory_class = enhancer
  regulatory 2008..2211: note = promoter - CMV promoter; regulatory_class = promoter
  gene 2265..2822: note = huIFNb opt 10
  regulatory 2826..3415: note = RBS - VCIP IRES ATUM; regulatory_class = ribosome_binding_site
  gene 3419..3979: note = hIFNa2 NM_000605.4 opt 10
  misc_feature 3993..4526: note = HPRE
  regulatory 4535..4759: note = polyA_signal - bGH poly(A) signal; regulatory_class = polyA_signal_sequence
  misc_feature 4738..4817: note = Duplexed DNA insert
  source 1..6476: mol_type = other DNA
  regulatory 2197..2203: note = TATA signal; regulatory_class = TATA_box
  misc_feature 2256..2261: note = Kozak sequence
  rep_origin 822..1410
  5'UTR 2212..2255
gaacaatggcgtgaagacctttgtgggcggtaactgtaccgttagcctgatgttgatgtcgctgggcggtctctttgcccataatctcgttgactgggtatccgtcgcgacctatcaggccgcctccggcggcggcgcgcgccatatgcgcgagctgttaacccagatgggtcagttgtatggccatgtcgccgatgaactggcgacgccgtcttccgcaattcttgatattgaacgcaaagttacggcattgacccgcagcggcgagctgccggttgataactttggcgtaccgctggcgggaagcctgatcccctggatcgacaaacagctcgataacggccagagccgcgaagagtggaaaggccaggcggaaaccaacaagattctcaatactgcctctgtgattccggttgatggtttgtgtgtgcgcgtcggcgcgctgcgctgtcacagccaggcgttcaccatcaagctgaaaaaagaggtatccattccgacggtggaagaactgctggcggcacataatccgtgggcgaaagtggtgccgaacgatcgtgatatcactatgcgcgaattaaccccggcggcggtgaccggcacgttgactacgccggttggtcgtctgcgtaagctgaacatggggccagagttcttgtcggcgtttaccgtaggcgaccagttgttatggggcgccgccgagccgctgcgtcgaatgctgcgccagttggcgtagttgataatctcatgaccaaaatcccttaacgtgagttttcgttccactgagcgtcagaccccgtagaaaagatcaaaggatcttcttgagatcctttttttctgcgcgtaatctgctgcttgcaaacaaaaaaaccaccgctaccagcggtggtttgtttgccggatcaagagctaccaactctttttccgaaggtaactggcttcagcagagcgcagataccaaatactgtccttctagtgtagccgtagttaggccaccacttcaagaactctgtagcaccgcctacatacctcgctctgctaatcctgttaccagtggctgctgccagtggcgataagtcgtgtcttaccgggttggactcaagacgatagttaccggataaggcgcagcggtcgggctgaacggggggttcgtgcacacagcccagcttggagcgaacgacctacaccgaactgagatacctacagcgtgagctatgagaaagcgccacgcttcccgaagggagaaaggcggacaggtatccggtaagcggcagggtcggaacaggagagcgcacgagggagcttccagggggaaacgcctggtatctttatagtcctgtcgggtttcgccacctctgacttgagcgtcgatttttgtgatgctcgtcaggggggcggagcctatggaaaaacgccagcaacgcggcctttttacggttcctggccttttgctggccttttgctcacatgttctttcctgcgttatcccctgattctgtggataaccgtattaccgcctttgagtgagctgataccgctcgccgcagccgaacgaccgagcgcagcgagtcagtgagcgaggaagcggtagagcgcccaatacgcaaaccgcctctccccgcgcgttggccgattcattaatgcagctggcacgacaggtttcccgactggaaagcgggcagtgagcgcaacgcaagtcgacccgttacataacttacggtaaatggcccgcctggctgaccgcccaacgacccccgcccattgacgtcaataatgacgtatgttcccatagtaacgccaatagggactttccattgacgtcaatgggtggagtatttacggtaaactgcccacttggcagtacatcaagtgtatcatatgccaagtacgccccctattgacgtcaatgacggtaaatggcccgcctggcattatgcccagtacatgaccttatgggactttcctacttggcagtacatctacgtattagtcatcgctattaccatggtgatgcggttttggcagtacatcaatgggcgtggatagcggtttgactcacggggatttccaagtctccaccccattgacgtcaatgggagtttgttttggcaccaaaatcaacgggactttccaaaatgtcgtaacaactccgccccattgacgcaaatgggcggtaggcgtgtacggtgggaggtctatataagcagagctggtttagtgaaccgtcttaagcgctagcgattacgccaagctcggccaccatgaccaacaagtgcctcctccagattgcactgctgttgtgcttcagcaccaccgctctcagcatgagctacaacctcttaggattcctgcagagaagcagcaacttccagtgtcagaagctgctgtggcaattgaacggcaggctggaatactgcctgaaggaccggatgaacttcgatatccccgaggagatcaagcagctgcagcagttccagaaggaggacgccgccctgaccatctacgagatgctgcagaacatcttcgctatcttcagacaagactcctctagcaccggctggaacgagaccattgttgagaacctgctggccaacgtctaccaccagatcaaccatctgaagaccgtgctggaagaaaaactggagaaagaggatttcaccaggggcaagttgatgagcagtctgcacctgaaaagatattatgggaggattctgcattacctgaaggccaaggagtactcgcactgtgcctggaccatcgtcagagtggaaatcctaaggaacttttacttcatcaacagattgacaggctacctccggaactgatgatagtggcagtttatggcgggcgtcctgcccgccaccctccagaaaacaaacccaggcgatcacagcagcagccgccgcggcagcagcaccaacagcaggaggagcaggaggagccggaggaggaggaggaggaggaggcaaagttagagttggggctggcgctccggagttgctgggctcagcgcagctcccattcattaaggaaccagctgcggaggaaggtggccgagcgcccgcgctgcccactcgctcgctcgcgcactcagacgcgcgccacaacagcgcgccccaagctgcgcagctctgcaaaagtttctgctcgggatctggctctcttccccttggactttagaacgatttagggttgacagaggaaagcagaggcgcgcaggaggagcagaaaacaccaccttctgcagttggaggcaggcagccccggctgcactctagccgccgcgcccggagccggggccgacccgccactatccgcagcagcctcggccaggaggcgacccgggcgcctgggtgtgtggctgctgttgcgggacgtcttcgcggggcgggaggctcgcgccgcagccagcgccatggccctcacctttgctcttctcgtggccctcctggtgctcagctgcaagtcgagctgctctgtgggctgtgatctgcctcaaacccacagcctgggtagcaggaggaccctgatgcttctggcacagatgaggagaatctctctcttttcctgtttgaaggacagacacgactttggatttccccaggaggagtttggcaaccagttccaaaaggctgagaccatccccgtgctgcatgagatgatccagcagatcttcaacctgttctccaccaaggactcctctgctgcctgggacgaaaccctgttagacaaattctacaccgaactgtaccagcagctgaacgacctggaggcctgcgtgatccagggcgtgggcgtgacagagacacccctgatgaaggaggacagcatcctggctgtgaggaagtacttccagagaatcaccctgtacctgaaggagaagaagtacagcccctgcgcctgggaggttgtgagagccgagatcatgaggagcttctctctgagcaccaacctgcaggagagcctgagaagcaaggagtgaaaccggtatgttgctcggcaacggcctggtctgtgccaagtgtttgctgacgcaacccccactggctggggcttggccataggccatcagcgcatgcgtggaacctttgtggctcctctgccgatccatactgcggaactcctagccgcttgttttgctcgcagccggtctggggcaaagctcatcggaactgacaattctgtcgtcctctcgcggaaatatacatcgtttccatggctgctaggttgtactgccaactgcatccttcgcgggacgtcctttgtttacgtcccgtcggcgctgaatcccgcggacgacccctctcggggccgcttgggactctctcgtccccttctccgtctgccgttccagccgaccacggggcgcacctctctttacgcggtctccccgtctgtgccttctcatctgccggtccgtgtgcacttcgcttcacctctgcacgttgcatggagaccaccgtgaacgcccatcagatcctgcccaaggtcttacataagaggactcttggactcccagcaatgtcggcgcgccctgtgccttctagttgccagccatctgttgtttgcccctcccccgtgccttccttgaccctggaaggtgccactcccactgtcctttcctaataaaatgaggaaattgcatcgcattgtctgagtaggtgtcattctattctggggggtggggtggggcaggacagcaagggggaggattgggaagacaatagcaggcatgctggggatgcggtgggctctatggggatccgctccggctcgagttaagccagccccgacacccgccaacacccgctgacgcgccctgacgggcttgtctgctcccggcatccgcttacagacaagctgtgaccgtctccgggagctgcatgtgtcagaggttttcaccgtcatcaccgaaacgcgcgagacgaaagggcctcgtgatacgcctatttttataggttaatgtcatgataataatggtttcttagacgtcaggtggcacttttcggggaaatgtgaagctttagaaaaactcatcgagcatcaaatgaaactgcaatttattcatatcaggattatcaataccatatttttgaaaaagccgtttctgtaatgaaggagaaaactcaccgaggcagttccataggatggcaagatcctggtatcggtctgcgattccgactcgtccaacatcaatacaacctattaatttcccctcgtcaaaaataaggttatcaagtgagaaatcaccatgagtgacgactgaatccggtgagaatggcaaaagtttatgcatttctttccagacttgttcaacaggccagccattacgctcgtcatcaaaatcactcgcatcaaccaaaccgttattcattcgtgattgcgcctgagcgagacgaaatacgcgatcgctgttaaaaggacaattacaaacaggaatcgaatgcaaccggcgcaggaacactgccagcgcatcaacaatattttcacctgaatcaggatattcttctaatacctggaatgctgtttttccggggatcgcagtggtgagtaaccatgcatcatcaggagtacggataaaatgcttgatggtcggaagaggcataaattccgtcagccagtttagtctgaccatctcatctgtaacatcattggcaacgctacctttgccatgtttcagaaacaactctggcgcatcgggcttcccatacaagcgatagattgtcgcacctgattgcccgacattatcgcgagcccatttatacccatataaatcagcatccatgttggaatttaatcgcggcctcgacgtttcccgttgaatatggctcataacaccccttgtattactgtttatgtaagcagacagttttattgttcatgatgatatatttttatcttgtgcaatgtaacatcagagattttgagacacgggccagagctgcaagcttctgtcagaccaagtttactcatatatactttagattgatttaaaacttcatttttaatttaaaaggatctaggtgaagatcctttatggtgaaggatgcgccacaggatactggcgcgcatacacagcacatctctttgcaggaaaaaaacgctatgaaaaatgttggttttatcggctggcgcggaatggtcggctctgttctcatgcaacgcatggtagaggagcgcgatttcgacgctattcgccctgttttcttttctacctcccagtttggacaggcggcgcccaccttcggcgacacctccaccggcacgctacaggacgcttttgatctggatgcgctaaaagcgctcgatatcatcgtgacctgccagggcggcgattataccaacgaaatttatccaaagctgcgcgaaagcggatggcagggttactggattgatgcggcttctacgctgcgcatgaaagatgatgccattattattctcgacccggtcaaccaggacgtgattaccgacggcct

SEQ ID NO: 513 - DNA, 6476 bp, synthetic construct
  misc_feature 1..6476: note = Synthetic DNA construct
  regulatory 1704..2007: note = enhancer - CMV; regulatory_class = enhancer
  regulatory 2008..2211: note = promoter - CMV promoter; regulatory_class = promoter
  gene 2265..2822: note = huIFNb
  regulatory 2826..3415: note = RBS - VCIP IRES ATUM; regulatory_class = ribosome_binding_site
  gene 3419..3979: note = hIFNa2 NM_000605.4
  misc_feature 3993..4526: note = HPRE
  regulatory 4535..4759: note = polyA_signal - bGH poly(A) signal; regulatory_class = polyA_signal_sequence
  misc_feature 4738..4817: note = Duplexed DNA insert
  source 1..6476: mol_type = other DNA
  rep_origin 822..1410
  regulatory 2197..2203: note = TATA signal; regulatory_class = TATA_box
  misc_feature 2256..2261: note = Kozak sequence
  5'UTR 2212..2255
gaacaatggcgtgaagacctttgtgggcggtaactgtaccgttagcctgatgttgatgtcgctgggcggtctctttgcccataatctcgttgactgggtatccgtcgcgacctatcaggccgcctccggcggcggcgcgcgccatatgcgcgagctgttaacccagatgggtcagttgtatggccatgtcgccgatgaactggcgacgccgtcttccgcaattcttgatattgaacgcaaagttacggcattgacccgcagcggcgagctgccggttgataactttggcgtaccgctggcgggaagcctgatcccctggatcgacaaacagctcgataacggccagagccgcgaagagtggaaaggccaggcggaaaccaacaagattctcaatactgcctctgtgattccggttgatggtttgtgtgtgcgcgtcggcgcgctgcgctgtcacagccaggcgttcaccatcaagctgaaaaaagaggtatccattccgacggtggaagaactgctggcggcacataatccgtgggcgaaagtggtgccgaacgatcgtgatatcactatgcgcgaattaaccccggcggcggtgaccggcacgttgactacgccggttggtcgtctgcgtaagctgaacatggggccagagttcttgtcggcgtttaccgtaggcgaccagttgttatggggcgccgccgagccgctgcgtcgaatgctgcgccagttggcgtagttgataatctcatgaccaaaatcccttaacgtgagttttcgttccactgagcgtcagaccccgtagaaaagatcaaaggatcttcttgagatcctttttttctgcgcgtaatctgctgcttgcaaacaaaaaaaccaccgctaccagcggtggtttgtttgccggatcaagagctaccaactctttttccgaaggtaactggcttcagcagagcgcagataccaaatactgtccttctagtgtagccgtagttaggccaccacttcaagaactctgtagcaccgcctacatacctcgctctgctaatcctgttaccagtggctgctgccagtggcgataagtcgtgtcttaccgggttggactcaagacgatagttaccggataaggcgcagcggtcgggctgaacggggggttcgtgcacacagcccagcttggagcgaacgacctacaccgaactgagatacctacagcgtgagctatgagaaagcgccacgcttcccgaagggagaaaggcggacaggtatccggtaagcggcagggtcggaacaggagagcgcacgagggagcttccagggggaaacgcctggtatctttatagtcctgtcgggtttcgccacctctgacttgagcgtcgatttttgtgatgctcgtcaggggggcggagcctatggaaaaacgccagcaacgcggcctttttacggttcctggccttttgctggccttttgctcacatgttctttcctgcgttatcccctgattctgtggataaccgtattaccgcctttgagtgagctgataccgctcgccgcagccgaacgaccgagcgcagcgagtcagtgagcgaggaagcggtagagcgcccaatacgcaaaccgcctctccccgcgcgttggccgattcattaatgcagctggcacgacaggtttcccgactggaaagcgggcagtgagcgcaacgcaagtcgacccgttacataacttacggtaaatggcccgcctggctgaccgcccaacgacccccgcccattgacgtcaataatgacgtatgttcccatagtaacgccaatagggactttccattgacgtcaatgggtggagtatttacggtaaactgcccacttggcagtacatcaagtgtatcatatgccaagtacgccccctattgacgtcaatgacggtaaatggcccgcctggcattatgcccagtacatgaccttatgggactttcctacttggcagtacatctacgtattagtcatcgctattaccatggtgatgcggttttggcagtacatcaatgggcgtggatagcggtttgactcacggggatttccaagtctccaccccattgacgtcaatgggagtttgttttggcaccaaaatcaacgggactttccaaaatgtcgtaacaactccgccccattgacgcaaatgggcggtaggcgtgtacggtgggaggtctatataagcagagctggtttagtgaaccgtcttaagcgctagcgattacgccaagctcggccaccatgaccaacaagtgtctcctccaaattgctctcctgttgtgcttctccactacagctctttccatgagctacaacttgcttggattcctacaaagaagcagcaattttcagtgtcagaagctcctgtggcaattgaatgggaggcttgaatactgcctcaaggacaggatgaactttgacatccctgaggagattaagcagctgcagcagttccagaaggaggacgccgcattgaccatctatgagatgctccagaacatctttgctattttcagacaagattcatctagcactggctggaatgagactattgttgagaacctcctggctaatgtctatcatcagataaaccatctgaagacagtcctggaagaaaaactggagaaagaagatttcaccaggggaaaactcatgagcagtctgcacctgaaaagatattatgggaggattctgcattacctgaaggccaaggagtacagtcactgtgcctggaccatagtcagagtggaaatcctaaggaacttttacttcattaacagacttacaggttacctccgaaactgatgatagtggcagtttatggcgggcgtcctgcccgccaccctccagaaaacaaacccaggcgatcacagcagcagccgccgcggcagcagcaccaacagcaggaggagcaggaggagccggaggaggaggaggaggaggaggcaaagttagagttggggctggcgctccggagttgctgggctcagcgcagctcccattcattaaggaaccagctgcggaggaaggtggccgagcgcccgcgctgcccactcgctcgctcgcgcactcagacgcgcgccacaacagcgcgccccaagctgcgcagctctgcaaaagtttctgctcgggatctggctctcttccccttggactttagaacgatttagggttgacagaggaaagcagaggcgcgcaggaggagcagaaaacaccaccttctgcagttggaggcaggcagccccggctgcactctagccgccgcgcccggagccggggccgacccgccactatccgcagcagcctcggccaggaggcgacccgggcgcctgggtgtgtggctgctgttgcgggacgtcttcgcggggcgggaggctcgcgccgcagccagcgccatggccttgacctttgctttactggtggccctcctggtgctcagctgcaagtcaagctgctctgtgggctgtgatctgcctcaaacccacagcctgggtagcaggaggaccttgatgctcctggcacagatgaggagaatctctcttttctcctgcttgaaggacagacatgactttggatttccccaggaggagtttggcaaccagttccaaaaggctgaaaccatccctgtcctccatgagatgatccagcagatcttcaatctcttcagcacaaaggactcatctgctgcttgggatgagaccctcctagacaaattctacactgaactctaccagcagctgaatgacctggaagcctgtgtgatacagggggtgggggtgacagagactcccctgatgaaggaggactccattctggctgtgaggaaatacttccaaagaatcactctctatctgaaagagaagaaatacagcccttgtgcctgggaggttgtcagagcagaaatcatgagatctttttctttgtcaacaaacttgcaagaaagtttaagaagtaaggaatgaaaccggtatgttgctcggcaacggcctggtctgtgccaagtgtttgctgacgcaacccccactggctggggcttggccataggccatcagcgcatgcgtggaacctttgtggctcctctgccgatccatactgcggaactcctagccgcttgttttgctcgcagccggtctggggcaaagctcatcggaactgacaattctgtcgtcctctcgcggaaatatacatcgtttccatggctgctaggttgtactgccaactgcatccttcgcgggacgtcctttgtttacgtcccgtcggcgctgaatcccgcggacgacccctctcggggccgcttgggactctctcgtccccttctccgtctgccgttccagccgaccacggggcgcacctctctttacgcggtctccccgtctgtgccttctcatctgccggtccgtgtgcacttcgcttcacctctgcacgttgcatggagaccaccgtgaacgcccatcagatcctgcccaaggtcttacataagaggactcttggactcccagcaatgtcggcgcgccctgtgccttctagttgccagccatctgttgtttgcccctcccccgtgccttccttgaccctggaaggtgccactcccactgtcctttcctaataaaatgaggaaattgcatcgcattgtctgagtaggtgtcattctattctggggggtggggtggggcaggacagcaagggggaggattgggaagacaatagcaggcatgctggggatgcggtgggctctatggggatccgctccggctcgagttaagccagccccgacacccgccaacacccgctgacgcgccctgacgggcttgtctgctcccggcatccgcttacagacaagctgtgaccgtctccgggagctgcatgtgtcagaggttttcaccgtcatcaccgaaacgcgcgagacgaaagggcctcgtgatacgcctatttttataggttaatgtcatgataataatggtttcttagacgtcaggtggcacttttcggggaaatgtgaagctttagaaaaactcatcgagcatcaaatgaaactgcaatttattcatatcaggattatcaataccatatttttgaaaaagccgtttctgtaatgaaggagaaaactcaccgaggcagttccataggatggcaagatcctggtatcggtctgcgattccgactcgtccaacatcaatacaacctattaatttcccctcgtcaaaaataaggttatcaagtgagaaatcaccatgagtgacgactgaatccggtgagaatggcaaaagtttatgcatttctttccagacttgttcaacaggccagccattacgctcgtcatcaaaatcactcgcatcaaccaaaccgttattcattcgtgattgcgcctgagcgagacgaaatacgcgatcgctgttaaaaggacaattacaaacaggaatcgaatgcaaccggcgcaggaacactgccagcgcatcaacaatattttcacctgaatcaggatattcttctaatacctggaatgctgtttttccggggatcgcagtggtgagtaaccatgcatcatcaggagtacggataaaatgcttgatggtcggaagaggcataaattccgtcagccagtttagtctgaccatctcatctgtaacatcattggcaacgctacctttgccatgtttcagaaacaactctggcgcatcgggcttcccatacaagcgatagattgtcgcacctgattgcccgacattatcgcgagcccatttatacccatataaatcagcatccatgttggaatttaatcgcggcctcgacgtttcccgttgaatatggctcataacaccccttgtattactgtttatgtaagcagacagttttattgttcatgatgatatatttttatcttgtgcaatgtaacatcagagattttgagacacgggccagagctgcaagcttctgtcagaccaagtttactcatatatactttagattgatttaaaacttcatttttaatttaaaaggatctaggtgaagatcctttatggtgaaggatgcgccacaggatactggcgcgcatacacagcacatctctttgcaggaaaaaaacgctatgaaaaatgttggttttatcggctggcgcggaatggtcggctctgttctcatgcaacgcatggtagaggagcgcgatttcgacgctattcgccctgttttcttttctacctcccagtttggacaggcggcgcccaccttcggcgacacctccaccggcacgctacaggacgcttttgatctggatgcgctaaaagcgctcgatatcatcgtgacctgccagggcggcgattataccaacgaaatttatccaaagctgcgcgaaagcggatggcagggttactggattgatgcggcttctacgctgcgcatgaaagatgatgccattattattctcgacccggtcaaccaggacgtgattaccgacggcct

SEQ ID NO: 514 - DNA, 6484 bp, synthetic construct
  misc_feature 1..6484: note = Synthetic DNA construct
  regulatory 1704..2007: note = enhancer - CMV; regulatory_class = enhancer
  regulatory 2008..2211: note = promoter - CMV promoter; regulatory_class = promoter
  regulatory 2256..2802: note = RBS - VCIP IRES; regulatory_class = ribosome_binding_site
  gene 2806..3366: note = hIFNa2 NM_000605.4 opt 8
  misc_feature 3367..3375: note = GSG linker opt 8
  gene 3376..3429: note = T2A opt 8
  gene 3430..3987: note = huIFNb opt 8
  misc_feature 4001..4534: note = HPRE
  regulatory 4543..4767: note = polyA_signal - bGH poly(A) signal; regulatory_class = polyA_signal_sequence
  misc_feature 4746..4825: note = Duplexed DNA insert
  source 1..6484: mol_type = other DNA
  rep_origin 822..1410
  regulatory 2197..2203: note = TATA signal; regulatory_class = TATA_box
  5'UTR 2212..2255
gaacaatggcgtgaagacctttgtgggcggtaactgtaccgttagcctgatgttgatgtcgctgggcggtctctttgcccataatctcgttgactgggtatccgtcgcgacctatcaggccgcctccggcggcggcgcgcgccatatgcgcgagctgttaacccagatgggtcagttgtatggccatgtcgccgatgaactggcgacgccgtcttccgcaattcttgatattgaacgcaaagttacggcattgacccgcagcggcgagctgccggttgataactttggcgtaccgctggcgggaagcctgatcccctggatcgacaaacagctcgataacggccagagccgcgaagagtggaaaggccaggcggaaaccaacaagattctcaatactgcctctgtgattccggttgatggtttgtgtgtgcgcgtcggcgcgctgcgctgtcacagccaggcgttcaccatcaagctgaaaaaagaggtatccattccgacggtggaagaactgctggcggcacataatccgtgggcgaaagtggtgccgaacgatcgtgatatcactatgcgcgaattaaccccggcggcggtgaccggcacgttgactacgccggttggtcgtctgcgtaagctgaacatggggccagagttcttgtcggcgtttaccgtaggcgaccagttgttatggggcgccgccgagccgctgcgtcgaatgctgcgccagttggcgtagttgataatctcatgaccaaaatcccttaacgtgagttttcgttccactgagcgtcagaccccgtagaaaagatcaaaggatcttcttgagatcctttttttctgcgcgtaatctgctgcttgcaaacaaaaaaaccaccgctaccagcggtggtttgtttgccggatcaagagctaccaactctttttccgaaggtaactggcttcagcagagcgcagataccaaatactgtccttctagtgtagccgtagttaggccaccacttcaagaactctgtagcaccgcctacatacctcgctctgctaatcctgttaccagtggctgctgccagtggcgataagtcgtgtcttaccgggttggactcaagacgatagttaccggataaggcgcagcggtcgggctgaacggggggttcgtgcacacagcccagcttggagcgaacgacctacaccgaactgagatacctacagcgtgagctatgagaaagcgccacgcttcccgaagggagaaaggcggacaggtatccggtaagcggcagggtcggaacaggagagcgcacgagggagcttccagggggaaacgcctggtatctttatagtcctgtcgggtttcgccacctctgacttgagcgtcgatttttgtgatgctcgtcaggggggcggagcctatggaaaaacgccagcaacgcggcctttttacggttcctggccttttgctggccttttgctcacatgttctttcctgcgttatcccctgattctgtggataaccgtattaccgcctttgagtgagctgataccgctcgccgcagccgaacgaccgagcgcagcgagtcagtgagcgaggaagcggtagagcgcccaatacgcaaaccgcctctccccgcgcgttggccgattcattaatgcagctggcacgacaggtttcccgactggaaagcgggcagtgagcgcaacgcaagtcgacccgttacataacttacggtaaatggcccgcctggctgaccgcccaacgacccccgcccattgacgtcaataatgacgtatgttcccatagtaacgccaatagggactttccattgacgtcaatgggtggagtatttacggtaaactgcccacttggcagtacatcaagtgtatcatatgccaagtacgccccctattgacgtcaatgacggtaaatggcccgcctggcattatgcccagtacatgaccttatgggactttcctacttggcagtacatctacgtattagtcatcgctattaccatggtgatgcggttttggcagtacatcaatgggcgtggatagcggtttgactcacggggatttccaagtctccaccccattgacgtcaatgggagtttgttttggcaccaaaatcaacgggactttccaaaatgtcgtaacaactccgccccattgacgcaaatgggcggtaggcgtgtacggtgggaggtctatataagcagagctggtttagtgaaccgtcttaagcgctagcgattacgccaagctcgagaaaacaaacccaggcgatcacagcagcagccgccgcggcagcagcaccaacagcaggaggagcaggaggagccggaggaggaggaggaggaggaggcaaagttagagttggggctggcgctccggagttgctgggctcagcgcagctcccattcattaaggaaccagctgcggaggaaggtggccgagcgcccgcgctgcccactcgctcgctcgcgcactcagacgcgcgccacaacagcgcgccccaagctgcgcagctctgcaaaagtttctgctcgggatctggctctcttccccttggactttagaacgatttagggttgacagaggaaagcagaggcgcgcaggaggagcagaaaacaccaccttctgcagttggaggcaggcagccccggctgcactctagccgccgcgcccggagccggggccgacccgccactatccgcagcagcctcggccaggaggcgacccgggcgcctgggtgtgtggctgctgttgcgggacgtcttcgcggggcgggaggctcgcgccgcagccagcgccatggccctcacctttgctcttctcgtggccctcctggtgctcagctgcaagtcgagctgctctgtgggctgtgatctgcctcaaacccacagcctgggtagcaggaggaccctgatgcttctggcacagatgaggagaatctctctcttttcctgtttgaaggacagacacgactttggatttccccaggaggagtttggcaaccagttccaaaaggctgagaccatccccgtgctgcatgagatgatccagcagatcttcaacctgttttctaccaaggattctagcgccgcctgggacgagaccctgttagacaaattctacaccgaactgtaccagcagctgaacgacctggaggcctgcgtgatccagggcgtgggcgtgacagagacacccctgatgaaggaggacagcatcctggctgtgaggaaatacttccagcgaatcaccctgtacctgaaggagaagaagtacagcccctgcgcctgggaggttgtgagagccgagatcatgaggagcttctccctgtccaccaacctgcaggaatctcttagaagcaaggaaggttcaggcgaggggagaggctcactcctgacttgcggcgatgtcgaggaaaaccccggacctaccaacaagtgtctcctccaaattgctctcctgttgtgcttcagcaccacagctcttagcatgagctacaacctgcttggcttcctgcaaagaagcagcaactttcagtgtcagaagctcctgtggcagctgaatggcaggcttgaatactgcctgaaggaccgaatgaacttcgatatccctgaggagattaagcagctgcagcagttccagaaggaggacgccgccctgaccatctacgagatgctgcagaacatcttcgccatcttcagacaggacagctccagcaccggctggaatgagactatcgtggagaacctgctggccaacgtctaccatcagatcaaccacctgaagacagtgctggaggagaagctggagaaggaagacttcaccaggggcaaactgatgagctctctgcacctgaaaagatactacggcaggatcctgcactacctgaaggccaaggagtacagtcactgtgcctggaccattgtgagagtggagatcctgaggaacttctacttcatcaacagactgaccggctacctgaggaactgaaaccggtatgttgctcggcaacggcctggtctgtgccaagtgtttgctgacgcaacccccactggctggggcttggccataggccatcagcgcatgcgtggaacctttgtggctcctctgccgatccatactgcggaactcctagccgcttgttttgctcgcagccggtctggggcaaagctcatcggaactgacaattctgtcgtcctctcgcggaaatatacatcgtttccatggctgctaggttgtactgccaactgcatccttcgcgggacgtcctttgtttacgtcccgtcggcgctgaatcccgcggacgacccctctcggggccgcttgggactctctcgtccccttctccgtctgccgttccagccgaccacggggcgcacctctctttacgcggtctccccgtctgtgccttctcatctgccggtccgtgtgcacttcgcttcacctctgcacgttgcatggagaccaccgtgaacgcccatcagatcctgcccaaggtcttacataagaggactcttggactcccagcaatgtcggcgcgccctgtgccttctagttgccagccatctgttgtttgcccctcccccgtgccttccttgaccctggaaggtgccactcccactgtcctttcctaataaaatgaggaaattgcatcgcattgtctgagtaggtgtcattctattctggggggtggggtggggcaggacagcaagggggaggattgggaagacaatagcaggcatgctggggatgcggtgggctctatggggatccgctccggctcgagttaagccagccccgacacccgccaacacccgctgacgcgccctgacgggcttgtctgctcccggcatccgcttacagacaagctgtgaccgtctccgggagctgcatgtgtcagaggttttcaccgtcatcaccgaaacgcgcgagacgaaagggcctcgtgatacgcctatttttataggttaatgtcatgataataatggtttcttagacgtcaggtggcacttttcggggaaatgtgaagctttagaaaaactcatcgagcatcaaatgaaactgcaatttattcatatcaggattatcaataccatatttttgaaaaagccgtttctgtaatgaaggagaaaactcaccgaggcagttccataggatggcaagatcctggtatcggtctgcgattccgactcgtccaacatcaatacaacctattaatttcccctcgtcaaaaataaggttatcaagtgagaaatcaccatgagtgacgactgaatccggtgagaatggcaaaagtttatgcatttctttccagacttgttcaacaggccagccattacgctcgtcatcaaaatcactcgcatcaaccaaaccgttattcattcgtgattgcgcctgagcgagacgaaatacgcgatcgctgttaaaaggacaattacaaacaggaatcgaatgcaaccggcgcaggaacactgccagcgcatcaacaatattttcacctgaatcaggatattcttctaatacctggaatgctgtttttccggggatcgcagtggtgagtaaccatgcatcatcaggagtacggataaaatgcttgatggtcggaagaggcataaattccgtcagccagtttagtctgaccatctcatctgtaacatcattggcaacgctacctttgccatgtttcagaaacaactctggcgcatcgggcttcccatacaagcgatagattgtcgcacctgattgcccgacattatcgcgagcccatttatacccatataaatcagcatccatgttggaatttaatcgcggcctcgacgtttcccgttgaatatggctcataacaccccttgtattactgtttatgtaagcagacagttttattgttcatgatgatatatttttatcttgtgcaatgtaacatcagagattttgagacacgggccagagctgcaagcttctgtcagaccaagtttactcatatatactttagattgatttaaaacttcatttttaatttaaaaggatctaggtgaagatcctttatggtgaaggatgcgccacaggatactggcgcgcatacacagcacatctctttgcaggaaaaaaacgctatgaaaaatgttggttttatcggctggcgcggaatggtcggctctgttctcatgcaacgcatggtagaggagcgcgatttcgacgctattcgccctgttttcttttctacctcccagtttggacaggcggcgcccaccttcggcgacacctccaccggcacgctacaggacgcttttgatctggatgcgctaaaagcgctcgatatcatcgtgacctgccagggcggcgattataccaacgaaatttatccaaagctgcgcgaaagcggatggcagggttactggattgatgcggcttctacgctgcgcatgaaagatgatgccattattattctcgacccggtcaaccaggacgtgattaccgacggcct

SEQ ID NO: 515 - DNA, 6484 bp, synthetic construct
  misc_feature 1..6484: note = Synthetic DNA construct
  regulatory 1704..2007: note = enhancer - CMV; regulatory_class = enhancer
  regulatory 2008..2211: note = promoter - CMV promoter; regulatory_class = promoter
  regulatory 2256..2802: note = RBS - VCIP IRES; regulatory_class = ribosome_binding_site
  gene 2806..3366: note = hIFNa2 NM_000605.4
  misc_feature 3367..3375: note = GGS Linker
  gene 3376..3429: note = T2A
  gene 3430..3987: note = huIFNb
  misc_feature 4001..4534: note = HPRE
  regulatory 4543..4767: note = polyA_signal - bGH poly(A) signal; regulatory_class = polyA_signal_sequence
  misc_feature 4746..4825: note = Duplexed DNA insert
  source 1..6484: mol_type = other DNA
  rep_origin 822..1410
  regulatory 2197..2203: note = TATA signal; regulatory_class = TATA_box
  5'UTR 2212..2255
gaacaatggcgtgaagacctttgtgggcggtaactgtaccgttagcctgatgttgatgtcgctgggcggtctctttgcccataatctcgttgactgggtatccgtcgcgacctatcaggccgcctccggcggcggcgcgcgccatatgcgcgagctgttaacccagatgggtcagttgtatggccatgtcgccgatgaactggcgacgccgtcttccgcaattcttgatattgaacgcaaagttacggcattgacccgcagcggcgagctgccggttgataactttggcgtaccgctggcgggaagcctgatcccctggatcgacaaacagctcgataacggccagagccgcgaagagtggaaaggccaggcggaaaccaacaagattctcaatactgcctctgtgattccggttgatggtttgtgtgtgcgcgtcggcgcgctgcgctgtcacagccaggcgttcaccatcaagctgaaaaaagaggtatccattccgacggtggaagaactgctggcggcacataatccgtgggcgaaagtggtgccgaacgatcgtgatatcactatgcgcgaattaaccccggcggcggtgaccggcacgttgactacgccggttggtcgtctgcgtaagctgaacatggggccagagttcttgtcggcgtttaccgtaggcgaccagttgttatggggcgccgccgagccgctgcgtcgaatgctgcgccagttggcgtagttgataatctcatgaccaaaatcccttaacgtgagttttcgttccactgagcgtcagaccccgtagaaaagatcaaaggatcttcttgagatcctttttttctgcgcgtaatctgctgcttgcaaacaaaaaaaccaccgctaccagcggtggtttgtttgccggatcaagagctaccaactctttttccgaaggtaactggcttcagcagagcgcagataccaaatactgtccttctagtgtagccgtagttaggccaccacttcaagaactctgtagcaccgcctacatacctcgctctgctaatcctgttaccagtggctgctgccagtggcgataagtcgtgtcttaccgggttggactcaagacgatagttaccggataaggcgcagcggtcgggctgaacggggggttcgtgcacacagcccagcttggagcgaacgacctacaccgaactgagatacctacagcgtgagctatgagaaagcgccacgcttcccgaagggagaaaggcggacaggtatccggtaagcggcagggtcggaacaggagagcgcacgagggagcttccagggggaaacgcctggtatctttatagtcctgtcgggtttcgccacctctgacttgagcgtcgatttttgtgatgctcgtcaggggggcggagcctatggaaaaacgccagcaacgcggcctttttacggttcctggccttttgctggccttttgctcacatgttctttcctgcgttatcccctgattctgtggataaccgtattaccgcctttgagtgagctgataccgctcgccgcagccgaacgaccgagcgcagcgagtcagtgagcgaggaagcggtagagcgcccaatacgcaaaccgcctctccccgcgcgttggccgattcattaatgcagctggcacgacaggtttcccgactggaaagcgggcagtgagcgcaacgcaagtcgacccgttacataacttacggtaaatggcccgcctggctgaccgcccaacgacccccgcccattgacgtcaataatgacgtatgttcccatagtaacgccaatagggactttccattgacgtcaatgggtggagtatttacggtaaactgcccacttggcagtacatcaagtgtatcatatgccaagtacgccccctattgacgtcaatgacggtaaatggcccgcctggcattatgcccagtacatgaccttatgggactttcctacttggcagtacatctacgtattagtcatcgctattaccatggtgatgcggttttggcagtacatcaatgggcgtggatagcggtttgactcacggggatttccaagtctccaccccattgacgtcaatgggagtttgttttggcaccaaaatcaacgggactttccaaaatgtcgtaacaactccgccccattgacgcaaatgggcggtaggcgtgtacggtgggaggtctatataagcagagctggtttagtgaaccgtcttaagcgctagcgattacgccaagctcgagaaaacaaacccaggcgatcacagcagcagccgccgcggcagcagcaccaacagcaggaggagcaggaggagccggaggaggaggaggaggaggaggcaaagttagagttggggctggcgctccggagttgctgggctcagcgcagctcccattcattaaggaaccagctgcggaggaaggtggccgagcgcccgcgctgcccactcgctcgctcgcgcactcagacgcgcgccacaacagcgcgccccaagctgcgcagctctgcaaaagtttctgctcgggatctggctctcttccccttggactttagaacgatttagggttgacagaggaaagcagaggcgcgcaggaggagcagaaaacaccaccttctgcagttggaggcaggcagccccggctgcactctagccgccgcgcccggagccggggccgacccgccactatccgcagcagcctcggccaggaggcgacccgggcgcctgggtgtgtggctgctgttgcgggacgtcttcgcggggcgggaggctcgcgccgcagccagcgccatggccttgacctttgctttactggtggccctcctggtgctcagctgcaagtcaagctgctctgtgggctgtgatctgcctcaaacccacagcctgggtagcaggaggaccttgatgctcctggcacagatgaggagaatctctcttttctcctgcttgaaggacagacatgactttggatttccccaggaggagtttggcaaccagttccaaaaggctgaaaccatccctgtcctccatgagatgatccagcagatcttcaatctcttcagcacaaaggactcatctgctgcttgggatgagaccctcctagacaaattctacactgaactctaccagcagctgaatgacctggaagcctgtgtgatacagggggtgggggtgacagagactcccctgatgaaggaggactccattctggctgtgaggaaatacttccaaagaatcactctctatctgaaagagaagaaatacagcccttgtgcctgggaggttgtcagagcagaaatcatgagatctttttctttgtcaacaaacttgcaagaaagtttaagaagtaaggaaggatcaggcgagggaagaggctcgcttctgacttgcggcgatgtcgaggaaaacccgggacctaccaacaagtgtctcctccaaattgctctcctgttgtgcttctccactacagctctttccatgagctacaacttgcttggattcctacaaagaagcagcaattttcagtgtcagaagctcctgtggcaattgaatgggaggcttgaatactgcctcaaggacaggatgaactttgacatccctgaggagattaagcagctgcagcagttccagaaggaggacgccgcattgaccatctatgagatgctccagaacatctttgctattttcagacaagattcatctagcactggctggaatgagactattgttgagaacctcctggctaatgtctatcatcagataaaccatctgaagacagtcctggaagaaaaactggagaaagaagatttcaccaggggaaaactcatgagcagtctgcacctgaaaagatattatgggaggattctgcattacctgaaggccaaggagtacagtcactgtgcctggaccatagtcagagtggaaatcctaaggaacttttacttcattaacagacttacaggttacctccgaaactgaaaccggtatgttgctcggcaacggcctggtctgtgccaagtgtttgctgacgcaacccccactggctggggcttggccataggccatcagcgcatgcgtggaacctttgtggctcctctgccgatccatactgcggaactcctagccgcttgttttgctcgcagccggtctggggcaaagctcatcggaactgacaattctgtcgtcctctcgcggaaatatacatcgtttccatggctgctaggttgtactgccaactgcatccttcgcgggacgtcctttgtttacgtcccgtcggcgctgaatcccgcggacgacccctctcggggccgcttgggactctctcgtccccttctccgtctgccgttccagccgaccacggggcgcacctctctttacgcggtctccccgtctgtgccttctcatctgccggtccgtgtgcacttcgcttcacctctgcacgttgcatggagaccaccgtgaacgcccatcagatcctgcccaaggtcttacataagaggactcttggactcccagcaatgtcggcgcgccctgtgccttctagttgccagccatctgttgtttgcccctcccccgtgccttccttgaccctggaaggtgccactcccactgtcctttcctaataaaatgaggaaattgcatcgcattgtctgagtaggtgtcattctattctggggggtggggtggggcaggacagcaagggggaggattgggaagacaatagcaggcatgctggggatgcggtgggctctatggggatccgctccggctcgagttaagccagccccgacacccgccaacacccgctgacgcgccctgacgggcttgtctgctcccggcatccgcttacagacaagctgtgaccgtctccgggagctgcatgtgtcagaggttttcaccgtcatcaccgaaacgcgcgagacgaaagggcctcgtgatacgcctatttttataggttaatgtcatgataataatggtttcttagacgtcaggtggcacttttcggggaaatgtgaagctttagaaaaactcatcgagcatcaaatgaaactgcaatttattcatatcaggattatcaataccatatttttgaaaaagccgtttctgtaatgaaggagaaaactcaccgaggcagttccataggatggcaagatcctggtatcggtctgcgattccgactcgtccaacatcaatacaacctattaatttcccctcgtcaaaaataaggttatcaagtgagaaatcaccatgagtgacgactgaatccggtgagaatggcaaaagtttatgcatttctttccagacttgttcaacaggccagccattacgctcgtcatcaaaatcactcgcatcaaccaaaccgttattcattcgtgattgcgcctgagcgagacgaaatacgcgatcgctgttaaaaggacaattacaaacaggaatcgaatgcaaccggcgcaggaacactgccagcgcatcaacaatattttcacctgaatcaggatattcttctaatacctggaatgctgtttttccggggatcgcagtggtgagtaaccatgcatcatcaggagtacggataaaatgcttgatggtcggaagaggcataaattccgtcagccagtttagtctgaccatctcatctgtaacatcattggcaacgctacctttgccatgtttcagaaacaactctggcgcatcgggcttcccatacaagcgatagattgtcgcacctgattgcccgacattatcgcgagcccatttatacccatataaatcagcatccatgttggaatttaatcgcggcctcgacgtttcccgttgaatatggctcataacaccccttgtattactgtttatgtaagcagacagttttattgttcatgatgatatatttttatcttgtgcaatgtaacatcagagattttgagacacgggccagagctgcaagcttctgtcagaccaagtttactcatatatactttagattgatttaaaacttcatttttaatttaaaaggatctaggtgaagatcctttatggtgaaggatgcgccacaggatactggcgcgcatacacagcacatctctttgcaggaaaaaaacgctatgaaaaatgttggttttatcggctggcgcggaatggtcggctctgttctcatgcaacgcatggtagaggagcgcgatttcgacgctattcgccctgttttcttttctacctcccagtttggacaggcggcgcccaccttcggcgacacctccaccggcacgctacaggacgcttttgatctggatgcgctaaaagcgctcgatatcatcgtgacctgccagggcggcgattataccaacgaaatttatccaaagctgcgcgaaagcggatggcagggttactggattgatgcggcttctacgctgcgcatgaaagatgatgccattattattctcgacccggtcaaccaggacgtgattaccgacggcct

SEQ ID NO: 516 - DNA, 6484 bp, synthetic construct
  misc_feature 1..6484: note = Synthetic DNA construct
  regulatory 1704..2007: note = enhancer - CMV; regulatory_class = enhancer
  regulatory 2008..2211: note = promoter - CMV promoter; regulatory_class = promoter
  regulatory 2256..2802: note = RBS - VCIP IRES; regulatory_class = ribosome_binding_site
  gene 2806..3363: note = huIFNb opt 7
  misc_feature 3364..3372: note = GSG linker opt 7
  gene 3373..3426: note = T2A opt 7
  gene 3427..3987: note = hIFNa2 NM_000605.4 opt 7
  misc_feature 4001..4534: note = HPRE
  regulatory 4543..4767: note = polyA_signal - bGH poly(A) signal; regulatory_class = polyA_signal_sequence
  misc_feature 4746..4825: note = Duplexed DNA insert
  source 1..6484: mol_type = other DNA
  rep_origin 822..1410
  regulatory 2197..2203: note = TATA signal; regulatory_class = TATA_box
  5'UTR 2212..2255
gaacaatggcgtgaagacctttgtgggcggtaactgtaccgttagcctgatgttgatgtcgctgggcggtctctttgcccataatctcgttgactgggtatccgtcgcgacctatcaggccgcctccggcggcggcgcgcgccatatgcgcgagctgttaacccagatgggtcagttgtatggccatgtcgccgatgaactggcgacgccgtcttccgcaattcttgatattgaacgcaaagttacggcattgacccgcagcggcgagctgccggttgataactttggcgtaccgctggcgggaagcctgatcccctggatcgacaaacagctcgataacggccagagccgcgaagagtggaaaggccaggcggaaaccaacaagattctcaatactgcctctgtgattccggttgatggtttgtgtgtgcgcgtcggcgcgctgcgctgtcacagccaggcgttcaccatcaagctgaaaaaagaggtatccattccgacggtggaagaactgctggcggcacataatccgtgggcgaaagtggtgccgaacgatcgtgatatcactatgcgcgaattaaccccggcggcggtgaccggcacgttgactacgccggttggtcgtctgcgtaagctgaacatggggccagagttcttgtcggcgtttaccgtaggcgaccagttgttatggggcgccgccgagccgctgcgtcgaatgctgcgccagttggcgtagttgataatctcatgaccaaaatcccttaacgtgagttttcgttccactgagcgtcagaccccgtagaaaagatcaaaggatcttcttgagatcctttttttctgcgcgtaatctgctgcttgcaaacaaaaaaaccaccgctaccagcggtggtttgtttgccggatcaagagctaccaactctttttccgaaggtaactggcttcagcagagcgcagataccaaatactgtccttctagtgtagccgtagttaggccaccacttcaagaactctgtagcaccgcctacatacctcgctctgctaatcctgttaccagtggctgctgccagtggcgataagtcgtgtcttaccgggttggactcaagacgatagttaccggataaggcgcagcggtcgggctgaacggggggttcgtgcacacagcccagcttggagcgaacgacctacaccgaactgagatacctacagcgtgagctatgagaaagcgccacgcttcccgaagggagaaaggcggacaggtatccggtaagcggcagggtcggaacaggagagcgcacgagggagcttccagggggaaacgcctggtatctttatagtcctgtcgggtttcgccacctctgacttgagcgtcgatttttgtgatgctcgtcaggggggcggagcctatggaaaaacgccagcaacgcggcctttttacggttcctggccttttgctggccttttgctcacatgttctttcctgcgttatcccctgattctgtggataaccgtattaccgcctttgagtgagctgataccgctcgccgcagccgaacgaccgagcgcagcgagtcagtgagcgaggaagcggtagagcgcccaatacgcaaaccgcctctccccgcgcgttggccgattcattaatgcagctggcacgacaggtttcccgactggaaagcgggcagtgagcgcaacgcaagtcgacccgttacataacttacggtaaatggcccgcctggctgaccgcccaacgacccccgcccattgacgtcaataatgacgtatgttcccatagtaacgccaatagggactttccattgacgtcaatgggtggagtatttacggtaaactgcccacttggcagtacatcaagtgtatcatatgccaagtacgccccctattgacgtcaatgacggtaaatggcccgcctggcattatgcccagtacatgaccttatgggactttcctacttggcagtacatctacgtattagtcatcgctattaccatggtgatgcggttttggcagtacatcaatgggcgtggatagcggtttgactcacggggatttccaagtctccaccccattgacgtcaatgggagtttgttttggcaccaaaatcaacgggactttccaaaatgtcgtaacaactccgccccattgacgcaaatgggcggtaggcgtgtacggtgggaggtctatataagcagagctggtttagtgaaccgtcttaagcgctagcgattacgccaagctcgagaaaacaaacccaggcgatcacagcagcagccgccgcggcagcagcaccaacagcaggaggagcaggaggagccggaggaggaggaggaggaggaggcaaagttagagttggggctggcgctccggagttgctgggctcagcgcagctcccattcattaaggaaccagctgcggaggaaggtggccgagcgcccgcgctgcccactcgctcgctcgcgcactcagacgcgcgccacaacagcgcgccccaagctgcgcagctctgcaaaagtttctgctcgggatctggctctcttccccttggactttagaacgatttagggttgacagaggaaagcagaggcgcgcaggaggagcagaaaacaccaccttctgcagttggaggcaggcagccccggctgcactctagccgccgcgcccggagccggggccgacccgccactatccgcagcagcctcggccaggaggcgacccgggcgcctgggtgtgtggctgctgttgcgggacgtcttcgcggggcgggaggctcgcgccgcagccagcgccatgaccaacaagtgtctccttcagattgcactgctgttgtgcttctccaccacagctctctccatgagctacaacctgcttggattcctgcaaagaagcagcaatttccagtgccagaagctcctgtggcaattgaatgggaggcttgagtactgcctgaaggaccgaatgaactttgacatccccgaggagattaagcagctgcagcagttccagaaggaggacgccgccctgaccatctacgagatgctgcagaacatcttcgccatcttcagacaggacagctccagcaccggctggaatgagactatcgtggagaacctgctggccaacgtgtaccatcagatcaaccacctgaagacagtgctggaggagaagctggagaaggaagacttcaccaggggcaaactgatgagctctctgcacctgaaaagatactacggcaggatcctgcactacctgaaggccaaggagtatagccactgtgcctggaccatagtgagagtggagatcctgaggaacttctacttcatcaacagactgaccggctacctgaggaacggctctggcgagggtagaggctcgttactgacatgcggcgatgtcgaggagaacccgggacctgccttgacctttgctttgctggtggccctcctggtgctcagctgcaagtcaagctgctctgtgggctgtgacctgcctcaaacccacagcctgggtagcaggaggaccctcatgctcctggctcagatgaggagaatctccctcttcagctgcctgaaggacagacacgacttcggatttccccaggaggagtttggcaaccagttccaaaaggctgagaccatccccgtgctgcatgagatgatccagcagatcttcaacctgttttccaccaaggatagcagcgctgcctgggacgaaaccctgctggacaagttttacaccgagctgtaccagcagctgaacgacctggaggcctgcgtgattcagggcgtgggcgtgacagagacacccctgatgaaggaggacagcatcctggccgtgaggaagtacttccagagaatcaccctgtacctgaaggagaagaagtacagcccctgcgcctgggaggttgtgagagccgagatcatgagaagcttcagcctgagcaccaacctgcaggagagcctgagaagcaaggagtgaaaccggtatgttgctcggcaacggcctggtctgtgccaagtgtttgctgacgcaacccccactggctggggcttggccataggccatcagcgcatgcgtggaacctttgtggctcctctgccgatccatactgcggaactcctagccgcttgttttgctcgcagccggtctggggcaaagctcatcggaactgacaattctgtcgtcctctcgcggaaatatacatcgtttccatggctgctaggttgtactgccaactgcatccttcgcgggacgtcctttgtttacgtcccgtcggcgctgaatcccgcggacgacccctctcggggccgcttgggactctctcgtccccttctccgtctgccgttccagccgaccacggggcgcacctctctttacgcggtctccccgtctgtgccttctcatctgccggtccgtgtgcacttcgcttcacctctgcacgttgcatggagaccaccgtgaacgcccatcagatcctgcccaaggtcttacataagaggactcttggactcccagcaatgtcggcgcgccctgtgccttctagttgccagccatctgttgtttgcccctcccccgtgccttccttgaccctggaaggtgccactcccactgtcctttcctaataaaatgaggaaattgcatcgcattgtctgagtaggtgtcattctattctggggggtggggtggggcaggacagcaagggggaggattgggaagacaatagcaggcatgctggggatgcggtgggctctatggggatccgctccggctcgagttaagccagccccgacacccgccaacacccgctgacgcgccctgacgggcttgtctgctcccggcatccgcttacagacaagctgtgaccgtctccgggagctgcatgtgtcagaggttttcaccgtcatcaccgaaacgcgcgagacgaaagggcctcgtgatacgcctatttttataggttaatgtcatgataataatggtttcttagacgtcaggtggcacttttcggggaaatgtgaagctttagaaaaactcatcgagcatcaaatgaaactgcaatttattcatatcaggattatcaataccatatttttgaaaaagccgtttctgtaatgaaggagaaaactcaccgaggcagttccataggatggcaagatcctggtatcggtctgcgattccgactcgtccaacatcaatacaacctattaatttcccctcgtcaaaaataaggttatcaagtgagaaatcaccatgagtgacgactgaatccggtgagaatggcaaaagtttatgcatttctttccagacttgttcaacaggccagccattacgctcgtcatcaaaatcactcgcatcaaccaaaccgttattcattcgtgattgcgcctgagcgagacgaaatacgcgatcgctgttaaaaggacaattacaaacaggaatcgaatgcaaccggcgcaggaacactgccagcgcatcaacaatattttcacctgaatcaggatattcttctaatacctggaatgctgtttttccggggatcgcagtggtgagtaaccatgcatcatcaggagtacggataaaatgcttgatggtcggaagaggcataaattccgtcagccagtttagtctgaccatctcatctgtaacatcattggcaacgctacctttgccatgtttcagaaacaactctggcgcatcgggcttcccatacaagcgatagattgtcgcacctgattgcccgacattatcgcgagcccatttatacccatataaatcagcatccatgttggaatttaatcgcggcctcgacgtttcccgttgaatatggctcataacaccccttgtattactgtttatgtaagcagacagttttattgttcatgatgatatatttttatcttgtgcaatgtaacatcagagattttgagacacgggccagagctgcaagcttctgtcagaccaagtttactcatatatactttagattgatttaaaacttcatttttaatttaaaaggatctaggtgaagatcctttatggtgaaggatgcgccacaggatactggcgcgcatacacagcacatctctttgcaggaaaaaaacgctatgaaaaatgttggttttatcggctggcgcggaatggtcggctctgttctcatgcaacgcatggtagaggagcgcgatttcgacgctattcgccctgttttcttttctacctcccagtttggacaggcggcgcccaccttcggcgacacctccaccggcacgctacaggacgcttttgatctggatgcgctaaaagcgctcgatatcatcgtgacctgccagggcggcgattataccaacgaaatttatccaaagctgcgcgaaagcggatggcagggttactggattgatgcggcttctacgctgcgcatgaaagatgatgccattattattctcgacccggtcaaccaggacgtgattaccgacggcct

SEQ ID NO: 517 - DNA, 6484 bp, synthetic construct
  misc_feature 1..6484: note = Synthetic DNA construct
  regulatory 1704..2007: note = enhancer - CMV; regulatory_class = enhancer
  regulatory 2008..2211: note = promoter - CMV promoter; regulatory_class = promoter
  regulatory 2256..2802: note = RBS - VCIP IRES; regulatory_class = ribosome_binding_site
  gene 2806..3363: note = huIFNb
  misc_feature 3364..3372: note = GGS Linker
  gene 3373..3426: note = T2A
  gene 3427..3987: note = hIFNa2 NM_000605.4
  misc_feature 4001..4534: note = HPRE
  regulatory 4543..4767: note = polyA_signal - bGH poly(A) signal; regulatory_class = polyA_signal_sequence
  misc_feature 4746..4825: note = Duplexed DNA insert
  source 1..6484: mol_type = other DNA
  rep_origin 822..1410
  regulatory 2197..2203: note = TATA signal; regulatory_class = TATA_box
  5'UTR 2212..2255
gaacaatggcgtgaagacctttgtgggcggtaactgtaccgttagcctgatgttgatgtcgctgggcggtctctttgcccataatctcgttgactgggtatccgtcgcgacctatcaggccgcctccggcggcggcgcgcgccatatgcgcgagctgttaacccagatgggtcagttgtatggccatgtcgccgatgaactggcgacgccgtcttccgcaattcttgatattgaacgcaaagttacggcattgacccgcagcggcgagctgccggttgataactttggcgtaccgctggcgggaagcctgatcccctggatcgacaaacagctcgataacggccagagccgcgaagagtggaaaggccaggcggaaaccaacaagattctcaatactgcctctgtgattccggttgatggtttgtgtgtgcgcgtcggcgcgctgcgctgtcacagccaggcgttcaccatcaagctgaaaaaagaggtatccattccgacggtggaagaactgctggcggcacataatccgtgggcgaaagtggtgccgaacgatcgtgatatcactatgcgcgaattaaccccggcggcggtgaccggcacgttgactacgccggttggtcgtctgcgtaagctgaacatggggccagagttcttgtcggcgtttaccgtaggcgaccagttgttatggggcgccgccgagccgctgcgtcgaatgctgcgccagttggcgtagttgataatctcatgaccaaaatcccttaacgtgagttttcgttccactgagcgtcagaccccgtagaaaagatcaaaggatcttcttgagatcctttttttctgcgcgtaatctgctgcttgcaaacaaaaaaaccaccgctaccagcggtggtttgtttgccggatcaagagctaccaactctttttccgaaggtaactggcttcagcagagcgcagataccaaatactgtccttctagtgtagccgtagttaggccaccacttcaagaactctgtagcaccgcctacatacctcgctctgctaatcctgttaccagtggctgctgccagtggcgataagtcgtgtcttaccgggttggactcaagacgatagttaccggataaggcgcagcggtcgggctgaacggggggttcgtgcacacagcccagcttggagcgaacgacctacaccgaactgagatacctacagcgtgagctatgagaaagcgccacgcttcccgaagggagaaaggcggacaggtatccggtaagcggcagggtcggaacaggagagcgcacgagggagcttccagggggaaacgcctggtatctttatagtcctgtcgggtttcgccacctctgacttgagcgtcgatttttgtgatgctcgtcaggggggcggagcctatggaaaaacgccagcaacgcggcctttttacggttcctggccttttgctggccttttgctcacatgttctttcctgcgttatcccctgattctgtggataaccgtattaccgcctttgagtgagctgataccgctcgccgcagccgaacgaccgagcgcagcgagtcagtgagcgaggaagcggtagagcgcccaatacgcaaaccgcctctccccgcgcgttggccgattcattaatgcagctggcacgacaggtttcccgactggaaagcgggcagtgagcgcaacgcaagtcgacccgttacataacttacggtaaatggcccgcctggctgaccgcccaacgacccccgcccattgacgtcaataatgacgtatgttcccatagtaacgccaatagggactttccattgacgtcaatgggtggagtatttacggtaaactgcccacttggcagtacatcaagtgtatcatatgccaagtacgccccctattgacgtcaatgacggtaaatggcccgcctggcattatgcccagtacatgaccttatgggactttcctacttggcagtacatctacgtattagtcatcgctattaccatggtgatgcggttttggcagtacatcaatgggcgtggatagcggtttgactcacggggatttccaagtctccaccccattgacgtcaatgggagtttgttttggcaccaaaatcaacgggactttccaaaatgtcgtaacaactccgccccattgacgcaaatgggcggtaggcgtgtacggtgggaggtctatataagcagagctggtttagtgaaccgtcttaagcgctagcgattacgccaagctcgagaaaacaaacccaggcgatcacagcagcagccgccgcggcagcagcaccaacagcaggaggagcaggaggagccggaggaggaggaggaggaggaggcaaagttagagttggggctggcgctccggagttgctgggctcagcgcagctcccattcattaaggaaccagctgcggaggaaggtggccgagcgcccgcgctgcccactcgctcgctcgcgcactcagacgcgcgccacaacagcgcgccccaagctgcgcagctctgcaaaagtttctgctcgggatctggctctcttccccttggactttagaacgatttagggttgacagaggaaagcagaggcgcgcaggaggagcagaaaacaccaccttctgcagttggaggcaggcagccccggctgcactctagccgccgcgcccggagccggggccgacccgccactatccgcagcagcctcggccaggaggcgacccgggcgcctgggtgtgtggctgctgttgcgggacgtcttcgcggggcgggaggctcgcgccgcagccagcgccatgaccaacaagtgtctcctccaaattgctctcctgttgtgcttctccactacagctctttccatgagctacaacttgcttggattcctacaaagaagcagcaattttcagtgtcagaagctcctgtggcaattgaatgggaggcttgaatactgcctcaaggacaggatgaactttgacatccctgaggagattaagcagctgcagcagttccagaaggaggacgccgcattgaccatctatgagatgctccagaacatctttgctattttcagacaagattcatctagcactggctggaatgagactattgttgagaacctcctggctaatgtctatcatcagataaaccatctgaagacagtcctggaagaaaaactggagaaagaagatttcaccaggggaaaactcatgagcagtctgcacctgaaaagatattatgggaggattctgcattacctgaaggccaaggagtacagtcactgtgcctggaccatagtcagagtggaaatcctaaggaacttttacttcattaacagacttacaggttacctccgaaacggatcaggcgagggaagaggctcgcttctgacttgcggcgatgtcgaggaaaacccgggacctgccttgacctttgctttactggtggccctcctggtgctcagctgcaagtcaagctgctctgtgggctgtgatctgcctcaaacccacagcctgggtagcaggaggaccttgatgctcctggcacagatgaggagaatctctcttttctcctgcttgaaggacagacatgactttggatttccccaggaggagtttggcaaccagttccaaaaggctgaaaccatccctgtcctccatgagatgatccagcagatcttcaatctcttcagcacaaaggactcatctgctgcttgggatgagaccctcctagacaaattctacactgaactctaccagcagctgaatgacctggaagcctgtgtgatacagggggtgggggtgacagagactcccctgatgaaggaggactccattctggctgtgaggaaatacttccaaagaatcactctctatctgaaagagaagaaatacagcccttgtgcctgggaggttgtcagagcagaaatcatgagatctttttctttgtcaacaaacttgcaagaaagtttaagaagtaaggaatgaaaccggtatgttgctcggcaacggcctggtctgtgccaagtgtttgctgacgcaacccccactggctggggcttggccataggccatcagcgcatgcgtggaacctttgtggctcctctgccgatccatactgcggaactcctagccgcttgttttgctcgcagccggtctggggcaaagctcatcggaactgacaattctgtcgtcctctcgcggaaatatacatcgtttccatggctgctaggttgtactgccaactgcatccttcgcgggacgtcctttgtttacgtcccgtcggcgctgaatcccgcggacgacccctctcggggccgcttgggactctctcgtccccttctccgtctgccgttccagccgaccacggggcgcacctctctttacgcggtctccccgtctgtgccttctcatctgccggtccgtgtgcacttcgcttcacctctgcacgttgcatggagaccaccgtgaacgcccatcagatcctgcccaaggtcttacataagaggactcttggactcccagcaatgtcggcgcgccctgtgccttctagttgccagccatctgttgtttgcccctcccccgtgccttccttgaccctggaaggtgccactcccactgtcctttcctaataaaatgaggaaattgcatcgcattgtctgagtaggtgtcattctattctggggggtggggtggggcaggacagcaagggggaggattgggaagacaatagcaggcatgctggggatgcggtgggctctatggggatccgctccggctcgagttaagccagccccgacacccgccaacacccgctgacgcgccctgacgggcttgtctgctcccggcatccgcttacagacaagctgtgaccgtctccgggagctgcatgtgtcagaggttttcaccgtcatcaccgaaacgcgcgagacgaaagggcctcgtgatacgcctatttttataggttaatgtcatgataataatggtttcttagacgtcaggtggcacttttcggggaaatgtgaagctttagaaaaactcatcgagcatcaaatgaaactgcaatttattcatatcaggattatcaataccatatttttgaaaaagccgtttctgtaatgaaggagaaaactcaccgaggcagttccataggatggcaagatcctggtatcggtctgcgattccgactcgtccaacatcaatacaacctattaatttcccctcgtcaaaaataaggttatcaagtgagaaatcaccatgagtgacgactgaatccggtgagaatggcaaaagtttatgcatttctttccagacttgttcaacaggccagccattacgctcgtcatcaaaatcactcgcatcaaccaaaccgttattcattcgtgattgcgcctgagcgagacgaaatacgcgatcgctgttaaaaggacaattacaaacaggaatcgaatgcaaccggcgcaggaacactgccagcgcatcaacaatattttcacctgaatcaggatattcttctaatacctggaatgctgtttttccggggatcgcagtggtgagtaaccatgcatcatcaggagtacggataaaatgcttgatggtcggaagaggcataaattccgtcagccagtttagtctgaccatctcatctgtaacatcattggcaacgctacctttgccatgtttcagaaacaactctggcgcatcgggcttcccatacaagcgatagattgtcgcacctgattgcccgacattatcgcgagcccatttatacccatataaatcagcatccatgttggaatttaatcgcggcctcgacgtttcccgttgaatatggctcataacaccccttgtattactgtttatgtaagcagacagttttattgttcatgatgatatatttttatcttgtgcaatgtaacatcagagattttgagacacgggccagagctgcaagcttctgtcagaccaagtttactcatatatactttagattgatttaaaacttcatttttaatttaaaaggatctaggtgaagatcctttatggtgaaggatgcgccacaggatactggcgcgcatacacagcacatctctttgcaggaaaaaaacgctatgaaaaatgttggttttatcggctggcgcggaatggtcggctctgttctcatgcaacgcatggtagaggagcgcgatttcgacgctattcgccctgttttcttttctacctcccagtttggacaggcggcgcccaccttcggcgacacctccaccggcacgctacaggacgcttttgatctggatgcgctaaaagcgctcgatatcatcgtgacctgccagggcggcgattataccaacgaaatttatccaaagctgcgcgaaagcggatggcagggttactggattgatgcggcttctacgctgcgcatgaaagatgatgccattattattctcgacccggtcaaccaggacgtgattaccgacggcct

SEQ ID NO: 518 - DNA, 7353 bp, synthetic construct
  misc_feature 1..7353: note = Synthetic DNA construct
  regulatory 1704..2007: note = enhancer - CMV; regulatory_class = enhancer
  regulatory 2008..2211: note = promoter - CMV promoter; regulatory_class = promoter
  gene 2308..2868: note = hIFNa2 NM_000605.4 opt 40
  misc_feature 2881..3414: note = HPRE
  regulatory 3423..3647: note = polyA_signal - bGH poly(A) signal; regulatory_class = polyA_signal_sequence
  regulatory 3678..3889: note = promoter - EF-1-alpha core promoter; regulatory_class = promoter
  gene 4213..4770: note = huIFNb opt 40
  misc_feature 4823..5411: note = WPRE
  regulatory 5434..5555: note = polyA_signal - SV40 poly(A) signal; regulatory_class = polyA_signal_sequence
  source 1..7353: mol_type = other DNA
  rep_origin 822..1410
  regulatory 2197..2203: note = TATA signal; regulatory_class = TATA_box
  regulatory 3827..3833: note = 3827..3833; regulatory_class = TATA_box
  misc_feature 2299..2304: note = Kozak sequence
  misc_feature 4204..4209: note = Kozak sequence
  5'UTR 2212..2298
  misc_feature 3902..4170: note = LTR
gaacaatggcgtgaagacctttgtgggcggtaactgtaccgttagcctgatgttgatgtcgctgggcggtctctttgcccataatctcgttgactgggtatccgtcgcgacctatcaggccgcctccggcggcggcgcgcgccatatgcgcgagctgttaacccagatgggtcagttgtatggccatgtcgccgatgaactggcgacgccgtcttccgcaattcttgatattgaacgcaaagttacggcattgacccgcagcggcgagctgccggttgataactttggcgtaccgctggcgggaagcctgatcccctggatcgacaaacagctcgataacggccagagccgcgaagagtggaaaggccaggcggaaaccaacaagattctcaatactgcctctgtgattccggttgatggtttgtgtgtgcgcgtcggcgcgctgcgctgtcacagccaggcgttcaccatcaagctgaaaaaagaggtatccattccgacggtggaagaactgctggcggcacataatccgtgggcgaaagtggtgccgaacgatcgtgatatcactatgcgcgaattaaccccggcggcggtgaccggcacgttgactacgccggttggtcgtctgcgtaagctgaacatggggccagagttcttgtcggcgtttaccgtaggcgaccagttgttatggggcgccgccgagccgctgcgtcgaatgctgcgccagttggcgtagttgataatctcatgaccaaaatcccttaacgtgagttttcgttccactgagcgtcagaccccgtagaaaagatcaaaggatcttcttgagatcctttttttctgcgcgtaatctgctgcttgcaaacaaaaaaaccaccgctaccagcggtggtttgtttgccggatcaagagctaccaactctttttccgaaggtaactggcttcagcagagcgcagataccaaatactgtccttctagtgtagccgtagttaggccaccacttcaagaactctgtagcaccgcctacatacctcgctctgctaatcctgttaccagtggctgctgccagtggcgataagtcgtgtcttaccgggttggactcaagacgatagttaccggataaggcgcagcggtcgggctgaacggggggttcgtgcacacagcccagcttggagcgaacgacctacaccgaactgagatacctacagcgtgagctatgagaaagcgccacgcttcccgaagggagaaaggcggacaggtatccggtaagcggcagggtcggaacaggagagcgcacgagggagcttccagggggaaacgcctggtatctttatagtcctgtcgggtttcgccacctctgacttgagcgtcgatttttgtgatgctcgtcaggggggcggagcctatggaaaaacgccagcaacgcggcctttttacggttcctggccttttgctggccttttgctcacatgttctttcctgcgttatcccctgattctgtggataaccgtattaccgcctttgagtgagctgataccgctcgccgcagccgaacgaccgagcgcagcgagtcagtgagcgaggaagcggtagagcgcccaatacgcaaaccgcctctccccgcgcgttggccgattcattaatgcagctggcacgacaggtttcccgactggaaagcgggcagtgagcgcaacgcaagtcgacccgttacataacttacggtaaatggcccgcctggctgaccgcccaacgacccccgcccattgacgtcaataatgacgtatgttcccatagtaacgccaatagggactttccattgacgtcaatgggtggagtatttacggtaaactgcccacttggcagtacatcaagtgtatcatatgccaagtacgccccctattgacgtcaatgacggtaaatggcccgcctggcattatgcccagtacatgaccttatgggactttcctacttggcagtacatctacgtattagtcatcgctattaccatggtgatgcggttttggcagtacatcaatgggcgtggatagcggtttgactcacggggatttccaagtctccaccccattgacgtcaatgggagtttgttttggcaccaaaatcaacgggactttccaaaatgtcgtaacaactccgccccattgacgcaaatgggcggtaggcgtgtacggtgggaggtctatataagcagagctggtttagtgaaccgtcagatccgctagcgattacgccaagctcgtctagacggcggccaagcttggcaatccggtactgttggtaaagccaccatggccctcacctttgctttactggtggccctgctggtgctgagctgcaagtccagctgcagcgtgggctgtgatctgcctcaaacccacagcctggggagcaggaggaccttgatgctgctggcccagatgaggagaatcagcctgttcagctgcctgaaggacagacacgactttggattcccccaggaggagtttggcaaccagttccaaaaggctgagaccatccccgtgctgcacgagatgattcagcagatctttaacctgttttccacaaaggacagctccgccgcctgggatgagaccctgctagacaaattctacaccgagctgtaccagcagctgaacgacctggaggcctgcgtgattcagggcgtgggcgtgacagagacacccctgatgaaggaggacagcatcctggccgtgaggaagtacttccagagaatcaccctgtacctgaaggagaagaagtacagcccctgcgcctgggaggttgtgcgggccgagatcatgagaagcttctccttgagcaccaacctgcaggagagcctgagaagcaaggagtgaaccggtatgttgctcggcaacggcctggtctgtgccaagtgtttgctgacgcaacccccactggctggggcttggccataggccatcagcgcatgcgtggaacctttgtggctcctctgccgatccatactgcggaactcctagccgcttgttttgctcgcagccggtctggggcaaagctcatcggaactgacaattctgtcgtcctctcgcggaaatatacatcgtttccatggctgctaggttgtactgccaactgcatccttcgcgggacgtcctttgtttacgtcccgtcggcgctgaatcccgcggacgacccctctcggggccgcttgggactctctcgtccccttctccgtctgccgttccagccgaccacggggcgcacctctctttacgcggtctccccgtctgtgccttctcatctgccggtccgtgtgcacttcgcttcacctctgcacgttgcatggagaccaccgtgaacgcccatcagatcctgcccaaggtcttacataagaggactcttggactcccagcaatgtcggcgcgccctgtgccttctagttgccagccatctgttgtttgcccctcccccgtgccttccttgaccctggaaggtgccactcccactgtcctttcctaataaaatgaggaaattgcatcgcattgtctgagtaggtgtcattctattctggggggtggggtggggcaggacagcaagggggaggattgggaagacaatagcaggcatgctggggatgcggtgggctctatggggatccgctccgggaattctgcccgtcagtgggcagagcgcacatcgcccacagtccccgagaagttggggggaggggtcggcaattgaacgggtgcctagagaaggtggcgcggggtaaactgggaaagtgatgtcgtgtactggctccgcctttttcccgagggtgggggagaaccgtatataagtgcagtagtcgccgtgaacgttctttttcgcaacgggtttgccgccagaacacagctgaagcttcgaggggctcgcatctctccttcacgcgcccgccgccctacctgaggccgccatccacgccggttgagtcgcgttctgccgcctcccgcctgtggtgcctcctgaactgcgtccgccgtctaggtaagtttaaagctcaggtcgagaccgggcctttgtccggcgctcccttggagcctacctagactcagccggctctccacgctttgcctgaccctgcttgctcaactctacgtctttgtttcgttttctgttctgcgccgttacagatccaagctgtgaccggcgcctacctgagatcaccggccaccatgaccaacaagtgcctgctgcagatcgccctgctgctgtgcttcagcaccaccgccctgagcatgagctacaacctgttgggcttcctgcagagaagcagcaacttccagtgccagaagctgctgtggcagctgaacggcaggctggagtactgcctgaaggaccggatgaacttcgacatccccgaggagatcaagcagctgcagcagttccagaaggaggacgccgccctgaccatctacgagatgctgcagaacatcttcgctatcttcagacaagactcctctagcaccggctggaacgagaccattgttgagaacctgctggccaacgtctaccaccagatcaaccatctgaagaccgtgctggaggagaagctggagaaggaagacttcaccaggggcaaactgatgagctctctgcacctgaaaagatactacggcaggatcctgcactacctgaaggccaaggagtacagtcactgtgcctggaccattgtgagagtggagatcctgaggaacttctacttcatcaacagactgaccggctacctgaggaactgaggccgcgactcgcggccgcctatgtacctcctgcttacaacacgctagcaatcaacctctggattacaaaatttgtgaaagattgactggtattcttaactatgttgctccttttacgctatgtggatacgctgctttaatgcctttgtatcatgctattgcttcccgtatggctttcattttctcctccttgtataaatcctggttgctgtctctttatgaggagttgtggcccgttgtcaggcaacgtggcgtggtgtgcactgtgtttgctgacgcaacccccactggttggggcattgccaccacctgtcagctcctttccgggactttcgctttccccctccctattgccacggcggaactcatcgccgcctgccttgcccgctgctggacaggggctcggctgttgggcactgacaattccgtggtgttgtcggggaagctgacgtcctttccatggctgctcgcctgtgttgccacctggattctgcgcgggacgtccttctgctacgtcccttcggccctcaatccagcggaccttccttcccgcggcctgctgccggctctgcggcctcttccgcgtcttcgccttcgccctcagacgagtcggatctccctttgggccgcctccccgcctggctagctggccagacatgataagatacattgatgagtttggacaaaccacaactagaatgcagtgaaaaaaatgctttatttgtgaaatttgtgatgctattgctttatttgtaaccattataagctgcaataaacaagttaacaacaacaattgcattcattttatgtttcaggttcagggggaggtgtgggaggttttttaaagcaagtaaaacctctacaaatgtggtatggctcgagttaagccagccccgacacccgccaacacccgctgacgcgccctgacgggcttgtctgctcccggcatccgcttacagacaagctgtgaccgtctccgggagctgcatgtgtcagaggttttcaccgtcatcaccgaaacgcgcgagacgaaagggcctcgtgatacgcctatttttataggttaatgtcatgataataatggtttcttagacgtcaggtggcacttttcggggaaatgtgaagctttagaaaaactcatcgagcatcaaatgaaactgcaatttattcatatcaggattatcaataccatatttttgaaaaagccgtttctgtaatgaaggagaaaactcaccgaggcagttccataggatggcaagatcctggtatcggtctgcgattccgactcgtccaacatcaatacaacctattaatttcccctcgtcaaaaataaggttatcaagtgagaaatcaccatgagtgacgactgaatccggtgagaatggcaaaagtttatgcatttctttccagacttgttcaacaggccagccattacgctcgtcatcaaaatcactcgcatcaaccaaaccgttattcattcgtgattgcgcctgagcgagacgaaatacgcgatcgctgttaaaaggacaattacaaacaggaatcgaatgcaaccggcgcaggaacactgccagcgcatcaacaatattttcacctgaatcaggatattcttctaatacctggaatgctgtttttccggggatcgcagtggtgagtaaccatgcatcatcaggagtacggataaaatgcttgatggtcggaagaggcataaattccgtcagccagtttagtctgaccatctcatctgtaacatcattggcaacgctacctttgccatgtttcagaaacaactctggcgcatcgggcttcccatacaagcgatagattgtcgcacctgattgcccgacattatcgcgagcccatttatacccatataaatcagcatccatgttggaatttaatcgcggcctcgacgtttcccgttgaatatggctcataacaccccttgtattactgtttatgtaagcagacagttttattgttcatgatgatatatttttatcttgtgcaatgtaacatcagagattttgagacacgggccagagctgcaagcttctgtcagaccaagtttactcatatatactttagattgatttaaaacttcatttttaatttaaaaggatctaggtgaagatcctttatggtgaaggatgcgccacaggatactggcgcgcatacacagcacatctctttgcaggaaaaaaacgctatgaaaaatgttggttttatcggctggcgcggaatggtcggctctgttctcatgcaacgcatggtagaggagcgcgatttcgacgctattcgccctgttttcttttctacctcccagtttggacaggcggcgcccaccttcggcgacacctccaccggcacgctacaggacgcttttgatctggatgcgctaaaagcgctcgatatcatcgtgacctgccagggcggcgattataccaacgaaatttatccaaagctgcgcgaaagcggatggcagggttactggattgatgcggcttctacgctgcgcatgaaagatgatgccattattattctcgacccggtcaaccaggacgtgattaccgacggcct

SEQ ID NO: 519 - DNA, 7353 bp, synthetic construct
  misc_feature 1..7353: note = Synthetic DNA construct
  regulatory 1704..2007: note = enhancer - CMV; regulatory_class = enhancer
  regulatory 2008..2211: note = promoter - CMV promoter; regulatory_class = promoter
  gene 2308..2868: note = hIFNa2 NM_000605.4
  misc_feature 2881..3414: note = HPRE
  regulatory 3423..3647: note = polyA_signal - bGH poly(A) signal; regulatory_class = polyA_signal_sequence
  regulatory 3678..3889: note = promoter - EF-1-alpha core promoter; regulatory_class = promoter
  gene 4213..4770: note = huIFNb
  misc_feature 4823..5411: note = WPRE
  regulatory 5434..5555: note = polyA_signal - SV40 poly(A) signal; regulatory_class = polyA_signal_sequence
  source 1..7353: mol_type = other DNA
  rep_origin 822..1410
  regulatory 2197..2203: note = TATA signal; regulatory_class = TATA_box
  misc_feature 2299..2304: note = Kozak sequence
  misc_feature 4204..4209: note = Kozak sequence
  5'UTR 2212..2298
  regulatory 3827..3833: note = TATA signal; regulatory_class = TATA_box
  misc_feature 3902..4170: note = LTR
gaacaatggcgtgaagacctttgtgggcggtaactgtaccgttagcctgatgttgatgtcgctgggcggtctctttgcccataatctcgttgactgggtatccgtcgcgacctatcaggccgcctccggcggcggcgcgcgccatatgcgcgagctgttaacccagatgggtcagttgtatggccatgtcgccgatgaactggcgacgccgtcttccgcaattcttgatattgaacgcaaagttacggcattgacccgcagcggcgagctgccggttgataactttggcgtaccgctggcgggaagcctgatcccctggatcgacaaacagctcgataacggccagagccgcgaagagtggaaaggccaggcggaaaccaacaagattctcaatactgcctctgtgattccggttgatggtttgtgtgtgcgcgtcggcgcgctgcgctgtcacagccaggcgttcaccatcaagctgaaaaaagaggtatccattccgacggtggaagaactgctggcggcacataatccgtgggcgaaagtggtgccgaacgatcgtgatatcactatgcgcgaattaaccccggcggcggtgaccggcacgttgactacgccggttggtcgtctgcgtaagctgaacatggggccagagttcttgtcggcgtttaccgtaggcgaccagttgttatggggcgccgccgagccgctgcgtcgaatgctgcgccagttggcgtagttgataatctcatgaccaaaatcccttaacgtgagttttcgttccactgagcgtcagaccccgtagaaaagatcaaaggatcttcttgagatcctttttttctgcgcgtaatctgctgcttgcaaacaaaaaaaccaccgctaccagcggtggtttgtttgccggatcaagagctaccaactctttttccgaaggtaactggcttcagcagagcgcagataccaaatactgtccttctagtgtagccgtagttaggccaccacttcaagaactctgtagcaccgcctacatacctcgctctgctaatcctgttaccagtggctgctgccagtggcgataagtcgtgtcttaccgggttggactcaagacgatagttaccggataaggcgcagcggtcgggctgaacggggggttcgtgcacacagcccagcttggagcgaacgacctacaccgaactgagatacctacagcgtgagctatgagaaagcgccacgcttcccgaagggagaaaggcggacaggtatccggtaagcggcagggtcggaacaggagagcgcacgagggagcttccagggggaaacgcctggtatctttatagtcctgtcgggtttcgccacctctgacttgagcgtcgatttttgtgatgctcgtcaggggggcggagcctatggaaaaacgccagcaacgcggcctttttacggttcctggccttttgctggccttttgctcacatgttctttcctgcgttatcccctgattctgtggataaccgtattaccgcctttgagtgagctgataccgctcgccgcagccgaacgaccgagcgcagcgagtcagtgagcgaggaagcggtagagcgcccaatacgcaaaccgcctctccccgcgcgttggccgattcattaatgcagctggcacgacaggtttcccgactggaaagcgggcagtgagcgcaacgcaagtcgacccgttacataacttacggtaaatggcccgcctggctgaccgcccaacgacccccgcccattgacgtcaataatgacgtatgttcccatagtaacgccaatagggactttccattgacgtcaatgggtggagtatttacggtaaactgcccacttggcagtacatcaagtgtatcatatgccaagtacgccccctattgacgtcaatgacggtaaatggcccgcctggcattatgcccagtacatgaccttatgggactttcctacttggcagtacatctacgtattagtcatcgctattaccatggtgatgcggttttggcagtacatcaatgggcgtggatagcggtttgactcacggggatttccaagtctccaccccattgacgtcaatgggagtttgttttggcaccaaaatcaacgggactttccaaaatgtcgtaacaactccgccccattgacgcaaatgggcggtaggcgtgtacggtgggaggtctatataagcagagctggtttagtgaaccgtcagatccgctagcgattacgccaagctcgtctagacggcggccaagcttggcaatccggtactgttggtaaagccaccatggccttgacctttgctttactggtggccctcctggtgctcagctgcaagtcaagctgctctgtgggctgtgatctgcctcaaacccacagcctgggtagcaggaggaccttgatgctcctggcacagatgaggagaatctctcttttctcctgcttgaaggacagacatgactttggatttccccaggaggagtttggcaaccagttccaaaaggctgaaaccatccctgtcctccatgagatgatccagcagatcttcaatctcttcagcacaaaggactcatctgctgcttgggatgagaccctcctagacaaattctacactgaactctaccagcagctgaatgacctggaagcctgtgtgatacagggggtgggggtgacagagactcccctgatgaaggaggactccattctggctgtgaggaaatacttccaaagaatcactctctatctgaaagagaagaaatacagcccttgtgcctgggaggttgtcagagcagaaatcatgagatctttttctttgtcaacaaacttgcaagaaagtttaagaagtaaggaatgaaccggtatgttgctcggcaacggcctggtctgtgccaagtgtttgctgacgcaacccccactggctggggcttggccataggccatcagcgcatgcgtggaacctttgtggctcctctgccgatccatactgcggaactcctagccgcttgttttgctcgcagccggtctggggcaaagctcatcggaactgacaattctgtcgtcctctcgcggaaatatacatcgtttccatggctgctaggttgtactgccaactgcatccttcgcgggacgtcctttgtttacgtcccgtcggcgctgaatcccgcggacgacccctctcggggccgcttgggactctctcgtccccttctccgtctgccgttccagccgaccacggggcgcacctctctttacgcggtctccccgtctgtgccttctcatctgccggtccgtgtgcacttcgcttcacctctgcacgttgcatggagaccaccgtgaacgcccatcagatcctgcccaaggtcttacataagaggactcttggactcccagcaatgtcggcgcgccctgtgccttctagttgccagccatctgttgtttgcccctcccccgtgccttccttgaccctggaaggtgccactcccactgtcctttcctaataaaatgaggaaattgcatcgcattgtctgagtaggtgtcattctattctggggggtggggtggggcaggacagcaagggggaggattgggaagacaatagcaggcatgctggggatgcggtgggctctatggggatccgctccgggaattctgcccgtcagtgggcagagcgcacatcgcccacagtccccgagaagttggggggaggggtcggcaattgaacgggtgcctagagaaggtggcgcggggtaaactgggaaagtgatgtcgtgtactggctccgcctttttcccgagggtgggggagaaccgtatataagtgcagtagtcgccgtgaacgttctttttcgcaacgggtttgccgccagaacacagctgaagcttcgaggggctcgcatctctccttcacgcgcccgccgccctacctgaggccgccatccacgccggttgagtcgcgttctgccgcctcccgcctgtggtgcctcctgaactgcgtccgccgtctaggtaagtttaaagctcaggtcgagaccgggcctttgtccggcgctcccttggagcctacctagactcagccggctctccacgctttgcctgaccctgcttgctcaactctacgtctttgtttcgttttctgttctgcgccgttacagatccaagctgtgaccggcgcctacctgagatcaccggccaccatgaccaacaagtgtctcctccaaattgctctcctgttgtgcttctccactacagctctttccatgagctacaacttgcttggattcctacaaagaagcagcaattttcagtgtcagaagctcctgtggcaattgaatgggaggcttgaatactgcctcaaggacaggatgaactttgacatccctgaggagattaagcagctgcagcagttccagaaggaggacgccgcattgaccatctatgagatgctccagaacatctttgctattttcagacaagattcatctagcactggctggaatgagactattgttgagaacctcctggctaatgtctatcatcagataaaccatctgaagacagtcctggaagaaaaactggagaaagaagatttcaccaggggaaaactcatgagcagtctgcacctgaaaagatattatgggaggattctgcattacctgaaggccaaggagtacagtcactgtgcctggaccatagtcagagtggaaatcctaaggaacttttacttcattaacagacttacaggttacctccgaaactgaggccgcgactcgcggccgcctatgtacctcctgcttacaacacgctagcaatcaacctctggattacaaaatttgtgaaagattgactggtattcttaactatgttgctccttttacgctatgtggatacgctgctttaatgcctttgtatcatgctattgcttcccgtatggctttcattttctcctccttgtataaatcctggttgctgtctctttatgaggagttgtggcccgttgtcaggcaacgtggcgtggtgtgcactgtgtttgctgacgcaacccccactggttggggcattgccaccacctgtcagctcctttccgggactttcgctttccccctccctattgccacggcggaactcatcgccgcctgccttgcccgctgctggacaggggctcggctgttgggcactgacaattccgtggtgttgtcggggaagctgacgtcctttccatggctgctcgcctgtgttgccacctggattctgcgcgggacgtccttctgctacgtcccttcggccctcaatccagcggaccttccttcccgcggcctgctgccggctctgcggcctcttccgcgtcttcgccttcgccctcagacgagtcggatctccctttgggccgcctccccgcctggctagctggccagacatgataagatacattgatgagtttggacaaaccacaactagaatgcagtgaaaaaaatgctttatttgtgaaatttgtgatgctattgctttatttgtaaccattataagctgcaataaacaagttaacaacaacaattgcattcattttatgtttcaggttcagggggaggtgtgggaggttttttaaagcaagtaaaacctctacaaatgtggtatggctcgagttaagccagccccgacacccgccaacacccgctgacgcgccctgacgggcttgtctgctcccggcatccgcttacagacaagctgtgaccgtctccgggagctgcatgtgtcagaggttttcaccgtcatcaccgaaacgcgcgagacgaaagggcctcgtgatacgcctatttttataggttaatgtcatgataataatggtttcttagacgtcaggtggcacttttcggggaaatgtgaagctttagaaaaactcatcgagcatcaaatgaaactgcaatttattcatatcaggattatcaataccatatttttgaaaaagccgtttctgtaatgaaggagaaaactcaccgaggcagttccataggatggcaagatcctggtatcggtctgcgattccgactcgtccaacatcaatacaacctattaatttcccctcgtcaaaaataaggttatcaagtgagaaatcaccatgagtgacgactgaatccggtgagaatggcaaaagtttatgcatttctttccagacttgttcaacaggccagccattacgctcgtcatcaaaatcactcgcatcaaccaaaccgttattcattcgtgattgcgcctgagcgagacgaaatacgcgatcgctgttaaaaggacaattacaaacaggaatcgaatgcaaccggcgcaggaacactgccagcgcatcaacaatattttcacctgaatcaggatattcttctaatacctggaatgctgtttttccggggatcgcagtggtgagtaaccatgcatcatcaggagtacggataaaatgcttgatggtcggaagaggcataaattccgtcagccagtttagtctgaccatctcatctgtaacatcattggcaacgctacctttgccatgtttcagaaacaactctggcgcatcgggcttcccatacaagcgatagattgtcgcacctgattgcccgacattatcgcgagcccatttatacccatataaatcagcatccatgttggaatttaatcgcggcctcgacgtttcccgttgaatatggctcataacaccccttgtattactgtttatgtaagcagacagttttattgttcatgatgatatatttttatcttgtgcaatgtaacatcagagattttgagacacgggccagagctgcaagcttctgtcagaccaagtttactcatatatactttagattgatttaaaacttcatttttaatttaaaaggatctaggtgaagatcctttatggtgaaggatgcgccacaggatactggcgcgcatacacagcacatctctttgcaggaaaaaaacgctatgaaaaatgttggttttatcggctggcgcggaatggtcggctctgttctcatgcaacgcatggtagaggagcgcgatttcgacgctattcgccctgttttcttttctacctcccagtttggacaggcggcgcccaccttcggcgacacctccaccggcacgctacaggacgcttttgatctggatgcgctaaaagcgctcgatatcatcgtgacctgccagggcggcgattataccaacgaaatttatccaaagctgcgcgaaagcggatggcagggttactggattgatgcggcttctacgctgcgcatgaaagatgatgccattattattctcgacccggtcaaccaggacgtgattaccgacggcct

SEQ ID NO: 520 - DNA, 5986 bp, synthetic construct
  misc_feature 1..5986: note = Synthetic DNA construct
  regulatory 1704..2007: note = enhancer - CMV; regulatory_class = enhancer
  regulatory 2008..2211: note = promoter - CMV promoter; regulatory_class = promoter
  gene 2308..2868: note = hIFNa2 NM_000605.4 opt 28
  misc_feature 2869..2877: note = GSG linker opt 28
  gene 2878..2931: note = T2A opt 28
  gene 2932..3489: note = huIFNb opt 28
  misc_feature 3503..4036: note = HPRE
  regulatory 4045..4269: note = polyA_signal - bGH poly(A) signal; regulatory_class = polyA_signal_sequence
  misc_feature 4248..4327: note = Duplexed DNA insert
  source 1..5986: mol_type = other DNA
  regulatory 2197..2203: note = TATA signal; regulatory_class = TATA_box
  misc_feature 2299..2304: note = Kozak sequence
  rep_origin 822..1410
  5'UTR 2197..2203
gaacaatggcgtgaagacctttgtgggcggtaactgtaccgttagcctgatgttgatgtcgctgggcggtctctttgcccataatctcgttgactgggtatccgtcgcgacctatcaggccgcctccggcggcggcgcgcgccatatgcgcgagctgttaacccagatgggtcagttgtatggccatgtcgccgatgaactggcgacgccgtcttccgcaattcttgatattgaacgcaaagttacggcattgacccgcagcggcgagctgccggttgataactttggcgtaccgctggcgggaagcctgatcccctggatcgacaaacagctcgataacggccagagccgcgaagagtggaaaggccaggcggaaaccaacaagattctcaatactgcctctgtgattccggttgatggtttgtgtgtgcgcgtcggcgcgctgcgctgtcacagccaggcgttcaccatcaagctgaaaaaagaggtatccattccgacggtggaagaactgctggcggcacataatccgtgggcgaaagtggtgccgaacgatcgtgatatcactatgcgcgaattaaccccggcggcggtgaccggcacgttgactacgccggttggtcgtctgcgtaagctgaacatggggccagagttcttgtcggcgtttaccgtaggcgaccagttgttatggggcgccgccgagccgctgcgtcgaatgctgcgccagttggcgtagttgataatctcatgaccaaaatcccttaacgtgagttttcgttccactgagcgtcagaccccgtagaaaagatcaaaggatcttcttgagatcctttttttctgcgcgtaatctgctgcttgcaaacaaaaaaaccaccgctaccagcggtggtttgtttgccggatcaagagctaccaactctttttccgaaggtaactggcttcagcagagcgcagataccaaatactgtccttctagtgtagccgtagttaggccaccacttcaagaactctgtagcaccgcctacatacctcgctctgctaatcctgttaccagtggctgctgccagtggcgataagtcgtgtcttaccgggttggactcaagacgatagttaccggataaggcgcagcggtcgggctgaacggggggttcgtgcacacagcccagcttggagcgaacgacctacaccgaactgagatacctacagcgtgagctatgagaaagcgccacgcttcccgaagggagaaaggcggacaggtatccggtaagcggcagggtcggaacaggagagcgcacgagggagcttccagggggaaacgcctggtatctttatagtcctgtcgggtttcgccacctctgacttgagcgtcgatttttgtgatgctcgtcaggggggcggagcctatggaaaaacgccagcaacgcggcctttttacggttcctggccttttgctggccttttgctcacatgttctttcctgcgttatcccctgattctgtggataaccgtattaccgcctttgagtgagctgataccgctcgccgcagccgaacgaccgagcgcagcgagtcagtgagcgaggaagcggtagagcgcccaatacgcaaaccgcctctccccgcgcgttggccgattcattaatgcagctggcacgacaggtttcccgactggaaagcgggcagtgagcgcaacgcaagtcgacccgttacataacttacggtaaatggcccgcctggctgaccgcccaacgacccccgcccattgacgtcaataatgacgtatgttcccatagtaacgccaatagggactttccattgacgtcaatgggtggagtatttacggtaaactgcccacttggcagtacatcaagtgtatcatatgccaagtacgccccctattgacgtcaatgacggtaaatggcccgcctggcattatgcccagtacatgaccttatgggactttcctacttggcagtacatctacgtattagtcatcgctattaccatggtgatgcggttttggcagtacatcaatgggcgtggatagcggtttgactcacggggatttccaagtctccaccccattgacgtcaatgggagtttgttttggcaccaaaatcaacgggactttccaaaatgtcgtaacaactccgccccattgacgcaaatgggcggtaggcgtgtacggtgggaggtctatataagcagagctggtttagtgaaccgtcagatccgctagcgattacgccaagctcgtctagacggcggccaagcttggcaatccggtactgttggtaaagccaccatggccctgaccttcgctttactggtggccctgctggtgctgagctgcaagtccagctgctccgttggatgcgatctgcctcaaacccacagcctgggcagcaggaggaccttgatgctgctggcccagatgaggagaatcagcctgttcagctgcctgaaggacagacacgactttggattcccccaggaggagtttggcaaccagttccaaaaggctgagaccatcccagtgctgcacgagatgatccagcagatctttaacctgttcagcacaaaggatagctccgctgcctgggatgagaccctgctagacaaattctacaccgagctgtaccagcagctgaacgacctggaggcctgcgtgattcagggcgtgggcgtgacagagacacccctgatgaaggaggacagcatcctggccgtgaggaagtacttccagagaatcaccctgtacctgaaggagaagaagtacagcccctgcgcctgggaggttgtgagggccgagatcatgagatccttcagcctgagcaccaacctgcaagaatcccttagaagcaaggagggctctggcgagggaagaggcagccttctgacttgcggcgatgtcgaggaaaacccgggacctaccaacaagtgtctcctccaaattgccctgctgttgtgcttctccaccacagctctgtccatgagctacaacctgcttggattcctccaaagaagcagcaattttcagtgtcagaagctcctgtggcaattgaatgggaggctcgagtactgcctgaaggaccggatgaatttcgacatccccgaggagatcaagcagctgcagcagttccagaaggaggacgccgccctgaccatctacgagatgctgcagaacatctttgccatcttcagacaggactcctcttccaccggctggaacgagaccattgttgagaacctgctggccaacgtctaccaccagatcaaccatctgaagaccgtgctggaggagaagctggagaaggaagacttcaccaggggcaaactgatgagctctctgcacctgaaaagatactacggcaggatcctgcactacctgaaggccaaggagtacagtcactgtgcctggaccattgtgagagtggagatcctgaggaacttctacttcatcaacagactgaccggctacctgaggaactgaaaccggtatgttgctcggcaacggcctggtctgtgccaagtgtttgctgacgcaacccccactggctggggcttggccataggccatcagcgcatgcgtggaacctttgtggctcctctgccgatccatactgcggaactcctagccgcttgttttgctcgcagccggtctggggcaaagctcatcggaactgacaattctgtcgtcctctcgcggaaatatacatcgtttccatggctgctaggttgtactgccaactgcatccttcgcgggacgtcctttgtttacgtcccgtcggcgctgaatcccgcggacgacccctctcggggccgcttgggactctctcgtccccttctccgtctgccgttccagccgaccacggggcgcacctctctttacgcggtctccccgtctgtgccttctcatctgccggtccgtgtgcacttcgcttcacctctgcacgttgcatggagaccaccgtgaacgcccatcagatcctgcccaaggtcttacataagaggactcttggactcccagcaatgtcggcgcgccctgtgccttctagttgccagccatctgttgtttgcccctcccccgtgccttccttgaccctggaaggtgccactcccactgtcctttcctaataaaatgaggaaattgcatcgcattgtctgagtaggtgtcattctattctggggggtggggtggggcaggacagcaagggggaggattgggaagacaatagcaggcatgctggggatgcggtgggctctatggggatccgctccggctcgagttaagccagccccgacacccgccaacacccgctgacgcgccctgacgggcttgtctgctcccggcatccgcttacagacaagctgtgaccgtctccgggagctgcatgtgtcagaggttttcaccgtcatcaccgaaacgcgcgagacgaaagggcctcgtgatacgcctatttttataggttaatgtcatgataataatggtttcttagacgtcaggtggcacttttcggggaaatgtgaagctttagaaaaactcatcgagcatcaaatgaaactgcaatttattcatatcaggattatcaataccatatttttgaaaaagccgtttctgtaatgaaggagaaaactcaccgaggcagttccataggatggcaagatcctggtatcggtctgcgattccgactcgtccaacatcaatacaacctattaatttcccctcgtcaaaaataaggttatcaagtgagaaatcaccatgagtgacgactgaatccggtgagaatggcaaaagtttatgcatttctttccagacttgttcaacaggccagccattacgctcgtcatcaaaatcactcgcatcaaccaaaccgttattcattcgtgattgcgcctgagcgagacgaaatacgcgatcgctgttaaaaggacaattacaaacaggaatcgaatgcaaccggcgcaggaacactgccagcgcatcaacaatattttcacctgaatcaggatattcttctaatacctggaatgctgtttttccggggatcgcagtggtgagtaaccatgcatcatcaggagtacggataaaatgcttgatggtcggaagaggcataaattccgtcagccagtttagtctgaccatctcatctgtaacatcattggcaacgctacctttgccatgtttcagaaacaactctggcgcatcgggcttcccatacaagcgatagattgtcgcacctgattgcccgacattatcgcgagcccatttatacccatataaatcagcatccatgttggaatttaatcgcggcctcgacgtttcccgttgaatatggctcataacaccccttgtattactgtttatgtaagcagacagttttattgttcatgatgatatatttttatcttgtgcaatgtaacatcagagattttgagacacgggccagagctgcaagcttctgtcagaccaagtttactcatatatactttagattgatttaaaacttcatttttaatttaaaaggatctaggtgaagatcctttatggtgaaggatgcgccacaggatactggcgcgcatacacagcacatctctttgcaggaaaaaaacgctatgaaaaatgttggttttatcggctggcgcggaatggtcggctctgttctcatgcaacgcatggtagaggagcgcgatttcgacgctattcgccctgttttcttttctacctcccagtttggacaggcggcgcccaccttcggcgacacctccaccggcacgctacaggacgcttttgatctggatgcgctaaaagcgctcgatatcatcgtgacctgccagggcggcgattataccaacgaaatttatccaaagctgcgcgaaagcggatggcagggttactggattgatgcggcttctacgctgcgcatgaaagatgatgccattattattctcgacccggtcaaccaggacgtgattaccgacggcct

SEQ ID NO: 521 - DNA, 5986 bp, synthetic construct
  misc_feature 1..5986: note = Synthetic DNA construct
  regulatory 1704..2007: note = enhancer - CMV; regulatory_class = enhancer
  regulatory 2008..2211: note = promoter - CMV promoter; regulatory_class = promoter
  gene 2308..2868: note = hIFNa2 NM_000605.4
  misc_feature 2869..2877: note = GGS Linker
  gene 2878..2931: note = T2A
  gene 2932..3489: note = huIFNb
  misc_feature 3503..4036: note = HPRE
  regulatory 4045..4269: note = polyA_signal - bGH poly(A) signal; regulatory_class = polyA_signal_sequence
  misc_feature 4248..4327: note = Duplexed DNA insert
  source 1..5986: mol_type = other DNA
  regulatory 2197..2203: note = TATA signal; regulatory_class = TATA_box
  misc_feature 2299..2304: note = Kozak sequence
  rep_origin 822..1410
  5'UTR 2212..2298
gaacaatggcgtgaagacctttgtgggcggtaactgtaccgttagcctgatgttgatgtcgctgggcggtctctttgcccataatctcgttgactgggtatccgtcgcgacctatcaggccgcctccggcggcggcgcgcgccatatgcgcgagctgttaacccagatgggtcagttgtatggccatgtcgccgatgaactggcgacgccgtcttccgcaattcttgatattgaacgcaaagttacggcattgacccgcagcggcgagctgccggttgataactttggcgtaccgctggcgggaagcctgatcccctggatcgacaaacagctcgataacggccagagccgcgaagagtggaaaggccaggcggaaaccaacaagattctcaatactgcctctgtgattccggttgatggtttgtgtgtgcgcgtcggcgcgctgcgctgtcacagccaggcgttcaccatcaagctgaaaaaagaggtatccattccgacggtggaagaactgctggcggcacataatccgtgggcgaaagtggtgccgaacgatcgtgatatcactatgcgcgaattaaccccggcggcggtgaccggcacgttgactacgccggttggtcgtctgcgtaagctgaacatggggccagagttcttgtcggcgtttaccgtaggcgaccagttgttatggggcgccgccgagccgctgcgtcgaatgctgcgccagttggcgtagttgataatctcatgaccaaaatcccttaacgtgagttttcgttccactgagcgtcagaccccgtagaaaagatcaaaggatcttcttgagatcctttttttctgcgcgtaatctgctgcttgcaaacaaaaaaaccaccgctaccagcggtggtttgtttgccggatcaagagctaccaactctttttccgaaggtaactggcttcagcagagcgcagataccaaatactgtccttctagtgtagccgtagttaggccaccacttcaagaactctgtagcaccgcctacatacctcgctctgctaatcctgttaccagtggctgctgccagtggcgataagtcgtgtcttaccgggttggactcaagacgatagttaccggataaggcgcagcggtcgggctgaacggggggttcgtgcacacagcccagcttggagcgaacgacctacaccgaactgagatacctacagcgtgagctatgagaaagcgccacgcttcccgaagggagaaaggcggacaggtatccggtaagcggcagggtcggaacaggagagcgcacgagggagcttccagggggaaacgcctggtatctttatagtcctgtcgggtttcgccacctctgacttgagcgtcgatttttgtgatgctcgtcaggggggcggagcctatggaaaaacgccagcaacgcggcctttttacggttcctggccttttgctggccttttgctcacatgttctttcctgcgttatcccctgattctgtggataaccgtattaccgcctttgagtgagctgataccgctcgccgcagccgaacgaccgagcgcagcgagtcagtgagcgaggaagcggtagagcgcccaatacgcaaaccgcctctccccgcgcgttggccgattcattaatgcagctggcacgacaggtttcccgactggaaagcgggcagtgagcgcaacgcaagtcgacccgttacataacttacggtaaatggcccgcctggctgaccgcccaacgacccccgcccattgacgtcaataatgacgtatgttcccatagtaacgccaatagggactttccattgacgtcaatgggtggagtatttacggtaaactgcccacttggcagtacatcaagtgtatcatatgccaagtacgccccctattgacgtcaatgacggtaaatggcccgcctggcattatgcccagtacatgaccttatgggactttcctacttggcagtacatctacgtattagtcatcgctattaccatggtgatgcggttttggcagtacatcaatgggcgtggatagcggtttgactcacggggatttccaagtctccaccccattgacgtcaatgggagtttgttttggcaccaaaatcaacgggactttccaaaatgtcgtaacaactccgccccattgacgcaaatgggcggtaggcgtgtacggtgggaggtctatataagcagagctggtttagtgaaccgtcagatccgctagcgattacgccaagctcgtctagacggcggccaagcttggcaatccggtactgttggtaaagccaccatggccttgacctttgctttactggtggccctcctggtgctcagctgcaagtcaagctgctctgtgggctgtgatctgcctcaaacccacagcctgggtagcaggaggaccttgatgctcctggcacagatgaggagaatctctcttttctcctgcttgaaggacagacatgactttggatttccccaggaggagtttggcaaccagttccaaaaggctgaaaccatccctgtcctccatgagatgatccagcagatcttcaatctcttcagcacaaaggactcatctgctgcttgggatgagaccctcctagacaaattctacactgaactctaccagcagctgaatgacctggaagcctgtgtgatacagggggtgggggtgacagagactcccctgatgaaggaggactccattctggctgtgaggaaatacttccaaagaatcactctctatctgaaagagaagaaatacagcccttgtgcctgggaggttgtcagagcagaaatcatgagatctttttctttgtcaacaaacttgcaagaaagtttaagaagtaaggaaggatcaggcgagggaagaggctcgcttctgacttgcggcgatgtcgaggaaaacccgggacctaccaacaagtgtctcctccaaattgctctcctgttgtgcttctccactacagctctttccatgagctacaacttgcttggattcctacaaagaagcagcaattttcagtgtcagaagctcctgtggcaattgaatgggaggcttgaatactgcctcaaggacaggatgaactttgacatccctgaggagattaagcagctgcagcagttccagaaggaggacgccgcattgaccatctatgagatgctccagaacatctttgctattttcagacaagattcatctagcactggctggaatgagactattgttgagaacctcctggctaatgtctatcatcagataaaccatctgaagacagtcctggaagaaaaactggagaaagaagatttcaccaggggaaaactcatgagcagtctgcacctgaaaagatattatgggaggattctgcattacctgaaggccaaggagtacagtcactgtgcctggaccatagtcagagtggaaatcctaaggaacttttacttcattaacagacttacaggttacctccgaaactgaaaccggtatgttgctcggcaacggcctggtctgtgccaagtgtttgctgacgcaacccccactggctggggcttggccataggccatcagcgcatgcgtggaacctttgtggctcctctgccgatccatactgcggaactcctagccgcttgttttgctcgcagccggtctggggcaaagctcatcggaactgacaattctgtcgtcctctcgcggaaatatacatcgtttccatggctgctaggttgtactgccaactgcatccttcgcgggacgtcctttgtttacgtcccgtcggcgctgaatcccgcggacgacccctctcggggccgcttgggactctctcgtccccttctccgtctgccgttccagccgaccacggggcgcacctctctttacgcggtctccccgtctgtgccttctcatctgccggtccgtgtgcacttcgcttcacctctgcacgttgcatggagaccaccgtgaacgcccatcagatcctgcccaaggtcttacataagaggactcttggactcccagcaatgtcggcgcgccctgtgccttctagttgccagccatctgttgtttgcccctcccccgtgccttccttgaccctggaaggtgccactcccactgtcctttcctaataaaatgaggaaattgcatcgcattgtctgagtaggtgtcattctattctggggggtggggtggggcaggacagcaagggggaggattgggaagacaatagcaggcatgctggggatgcggtgggctctatggggatccgctccggctcgagttaagccagccccgacacccgccaacacccgctgacgcgccctgacgggcttgtctgctcccggcatccgcttacagacaagctgtgaccgtctccgggagctgcatgtgtcagaggttttcaccgtcatcaccgaaacgcgcgagacgaaagggcctcgtgatacgcctatttttataggttaatgtcatgataataatggtttcttagacgtcaggtggcacttttcggggaaatgtgaagctttagaaaaactcatcgagcatcaaatgaaactgcaatttattcatatcaggattatcaataccatatttttgaaaaagccgtttctgtaatgaaggagaaaactcaccgaggcagttccataggatggcaagatcctggtatcggtctgcgattccgactcgtccaacatcaatacaacctattaatttcccctcgtcaaaaataaggttatcaagtgagaaatcaccatgagtgacgactgaatccggtgagaatggcaaaagtttatgcatttctttccagacttgttcaacaggccagccattacgctcgtcatcaaaatcactcgcatcaaccaaaccgttattcattcgtgattgcgcctgagcgagacgaaatacgcgatcgctgttaaaaggacaattacaaacaggaatcgaatgcaaccggcgcaggaacactgccagcgcatcaacaatattttcacctgaatcaggatattcttctaatacctggaatgctgtttttccggggatcgcagtggtgagtaaccatgcatcatcaggagtacggataaaatgcttgatggtcggaagaggcataaattccgtcagccagtttagtctgaccatctcatctgtaacatcattggcaacgctacctttgccatgtttcagaaacaactctggcgcatcgggcttcccatacaagcgatagattgtcgcacctgattgcccgacattatcgcgagcccatttatacccatataaatcagcatccatgttggaatttaatcgcggcctcgacgtttcccgttgaatatggctcataacaccccttgtattactgtttatgtaagcagacagttttattgttcatgatgatatatttttatcttgtgcaatgtaacatcagagattttgagacacgggccagagctgcaagcttctgtcagaccaagtttactcatatatactttagattgatttaaaacttcatttttaatttaaaaggatctaggtgaagatcctttatggtgaaggatgcgccacaggatactggcgcgcatacacagcacatctctttgcaggaaaaaaacgctatgaaaaatgttggttttatcggctggcgcggaatggtcggctctgttctcatgcaacgcatggtagaggagcgcgatttcgacgctattcgccctgttttcttttctacctcccagtttggacaggcggcgcccaccttcggcgacacctccaccggcacgctacaggacgcttttgatctggatgcgctaaaagcgctcgatatcatcgtgacctgccagggcggcgattataccaacgaaatttatccaaagctgcgcgaaagcggatggcagggttactggattgatgcggcttctacgctgcgcatgaaagatgatgccattattattctcgacccggtcaaccaggacgtgattaccgacggcct

SEQ ID NO: 522 - DNA, 5847 bp, synthetic construct
  misc_feature 1..5847: note = Synthetic DNA construct
  regulatory 1704..2007: note = enhancer - CMV; regulatory_class = enhancer
  regulatory 2008..2211: note = promoter - CMV promoter; regulatory_class = promoter
  gene 2308..2868: note = hIFNa2 NM_000605.4 opt 28
  misc_feature 2869..2877: note = GSG linker opt 28
  gene 2878..2931: note = T2A opt 28
  gene 2932..3489: note = huIFNb opt 28
  misc_feature 3503..4036: note = HPRE
  regulatory 4067..4188: note = polyA_signal - SV40 poly(A) signal; regulatory_class = polyA_signal_sequence
  source 1..5847: mol_type = other DNA
  regulatory 2197..2203: note = TATA signal; regulatory_class = TATA_box
  rep_origin 822..1410
  misc_feature 2299..2304: note = Kozak sequence
  5'UTR 2212..2298
gaacaatggcgtgaagacctttgtgggcggtaactgtaccgttagcctgatgttgatgtcgctgggcggtctctttgcccataatctcgttgactgggtatccgtcgcgacctatcaggccgcctccggcggcggcgcgcgccatatgcgcgagctgttaacccagatgggtcagttgtatggccatgtcgccgatgaactggcgacgccgtcttccgcaattcttgatattgaacgcaaagttacggcattgacccgcagcggcgagctgccggttgataactttggcgtaccgctggcgggaagcctgatcccctggatcgacaaacagctcgataacggccagagccgcgaagagtggaaaggccaggcggaaaccaacaagattctcaatactgcctctgtgattccggttgatggtttgtgtgtgcgcgtcggcgcgctgcgctgtcacagccaggcgttcaccatcaagctgaaaaaagaggtatccattccgacggtggaagaactgctggcggcacataatccgtgggcgaaagtggtgccgaacgatcgtgatatcactatgcgcgaattaaccccggcggcggtgaccggcacgttgactacgccggttggtcgtctgcgtaagctgaacatggggccagagttcttgtcggcgtttaccgtaggcgaccagttgttatggggcgccgccgagccgctgcgtcgaatgctgcgccagttggcgtagttgataatctcatgaccaaaatcccttaacgtgagttttcgttccactgagcgtcagaccccgtagaaaagatcaaaggatcttcttgagatcctttttttctgcgcgtaatctgctgcttgcaaacaaaaaaaccaccgctaccagcggtggtttgtttgccggatcaagagctaccaactctttttccgaaggtaactggcttcagcagagcgcagataccaaatactgtccttctagtgtagccgtagttaggccaccacttcaagaactctgtagcaccgcctacatacctcgctctgctaatcctgttaccagtggctgctgccagtggcgataagtcgtgtcttaccgggttggactcaagacgatagttaccggataaggcgcagcggtcgggctgaacggggggttcgtgcacacagcccagcttggagcgaacgacctacaccgaactgagatacctacagcgtgagctatgagaaagcgccacgcttcccgaagggagaaaggcggacaggtatccggtaagcggcagggtcggaacaggagagcgcacgagggagcttccagggggaaacgcctggtatctttatagtcctgtcgggtttcgccacctctgacttgagcgtcgatttttgtgatgctcgtcaggggggcggagcctatggaaaaacgccagcaacgcggcctttttacggttcctggccttttgctggccttttgctcacatgttctttcctgcgttatcccctgattctgtggataaccgtattaccgcctttgagtgagctgataccgctcgccgcagccgaacgaccgagcgcagcgagtcagtgagcgaggaagcggtagagcgcccaatacgcaaaccgcctctccccgcgcgttggccgattcattaatgcagctggcacgacaggtttcccgactggaaagcgggcagtgagcgcaacgcaagtcgacccgttacataacttacggtaaatggcccgcctggctgaccgcccaacgacccccgcccattgacgtcaataatgacgtatgttcccatagtaacgccaatagggactttccattgacgtcaatgggtggagtatttacggtaaactgcccacttggcagtacatcaagtgtatcatatgccaagtacgccccctattgacgtcaatgacggtaaatggcccgcctggcattatgcccagtacatgaccttatgggactttcctacttggcagtacatctacgtattagtcatcgctattaccatggtgatgcggttttggcagtacatcaatgggcgtggatagcggtttgactcacggggatttccaagtctccaccccattgacgtcaatgggagtttgttttggcaccaaaatcaacgggactttccaaaatgtcgtaacaactccgccccattgacgcaaatgggcggtaggcgtgtacggtgggaggtctatataagcagagctggtttagtgaaccgtcagatccgctagcgattacgccaagctcgtctagacggcggccaagcttggcaatccggtactgttggtaaagccaccatggccctgaccttcgctttactggtggccctgctggtgctgagctgcaagtccagctgctccgttggatgcgatctgcctcaaacccacagcctgggcagcaggaggaccttgatgctgctggcccagatgaggagaatcagcctgttcagctgcctgaaggacagacacgactttggattcccccaggaggagtttggcaaccagttccaaaaggctgagaccatcccagtgctgcacgagatgatccagcagatctttaacctgttcagcacaaaggatagctccgctgcctgggatgagaccctgctagacaaattctacaccgagctgtaccagcagctgaacgacctggaggcctgcgtgattcagggcgtgggcgtgacagagacacccctgatgaaggaggacagcatcctggccgtgaggaagtacttccagagaatcaccctgtacctgaaggagaagaagtacagcccctgcgcctgggaggttgtgagggccgagatcatgagatccttcagcctgagcaccaacctgcaagaatcccttagaagcaaggagggctctggcgagggaagaggcagccttctgacttgcggcgatgtcgaggaaaacccgggacctaccaacaagtgtctcctccaaattgccctgctgttgtgcttctccaccacagctctgtccatgagctacaacctgcttggattcctccaaagaagcagcaattttcagtgtcagaagctcctgtggcaattgaatgggaggctcgagtactgcctgaaggaccggatgaatttcgacatccccgaggagatcaagcagctgcagcagttccagaaggaggacgccgccctgaccatctacgagatgctgcagaacatctttgccatcttcagacaggactcctcttccaccggctggaacgagaccattgttgagaacctgctggccaacgtctaccaccagatcaaccatctgaagaccgtgctggaggagaagctggagaaggaagacttcaccaggggcaaactgatgagctctctgcacctgaaaagatactacggcaggatcctgcactacctgaaggccaaggagtacagtcactgtgcctggaccattgtgagagtggagatcctgaggaacttctacttcatcaacagactgaccggctacctgaggaactgaaaccggtatgttgctcggcaacggcctggtctgtgccaagtgtttgctgacgcaacccccactggctggggcttggccataggccatcagcgcatgcgtggaacctttgtggctcctctgccgatccatactgcggaactcctagccgcttgttttgctcgcagccggtctggggcaaagctcatcggaactgacaattctgtcgtcctctcgcggaaatatacatcgtttccatggctgctaggttgtactgccaactgcatccttcgcgggacgtcctttgtttacgtcccgtcggcgctgaatcccgcggacgacccctctcggggccgcttgggactctctcgtccccttctccgtctgccgttccagccgaccacggggcgcacctctctttacgcggtctccccgtctgtgccttctcatctgccggtccgtgtgcacttcgcttcacctctgcacgttgcatggagaccaccgtgaacgcccatcagatcctgcccaaggtcttacataagaggactcttggactcccagcaatgtcggcgcgccctggctagctggccagacatgataagatacattgatgagtttggacaaaccacaactagaatgcagtgaaaaaaatgctttatttgtgaaatttgtgatgctattgctttatttgtaaccattataagctgcaataaacaagttccctgacgggcttgtctgctcccggcatccgcttacagacaagctgtgaccgtctccgggagctgcatgtgtcagaggttttcaccgtcatcaccgaaacgcgcgagacgaaagggcctcgtgatacgcctatttttataggttaatgtcatgataataatggtttcttagacgtcaggtggcacttttcggggaaatgtgaagctttagaaaaactcatcgagcatcaaatgaaactgcaatttattcatatcaggattatcaataccatatttttgaaaaagccgtttctgtaatgaaggagaaaactcaccgaggcagttccataggatggcaagatcctggtatcggtctgcgattccgactcgtccaacatcaatacaacctattaatttcccctcgtcaaaaataaggttatcaagtgagaaatcaccatgagtgacgactgaatccggtgagaatggcaaaagtttatgcatttctttccagacttgttcaacaggccagccattacgctcgtcatcaaaatcactcgcatcaaccaaaccgttattcattcgtgattgcgcctgagcgagacgaaatacgcgatcgctgttaaaaggacaattacaaacaggaatcgaatgcaaccggcgcaggaacactgccagcgcatcaacaatattttcacctgaatcaggatattcttctaatacctggaatgctgtttttccggggatcgcagtggtgagtaaccatgcatcatcaggagtacggataaaatgcttgatggtcggaagaggcataaattccgtcagccagtttagtctgaccatctcatctgtaacatcattggcaacgctacctttgccatgtttcagaaacaactctggcgcatcgggcttcccatacaagcgatagattgtcgcacctgattgcccgacattatcgcgagcccatttatacccatataaatcagcatccatgttggaatttaatcgcggcctcgacgtttcccgttgaatatggctcataacaccccttgtattactgtttatgtaagcagacagttttattgttcatgatgatatatttttatcttgtgcaatgtaacatcagagattttgagacacgggccagagctgcaagcttctgtcagaccaagtttactcatatatactttagattgatttaaaacttcatttttaatttaaaaggatctaggtgaagatcctttatggtgaaggatgcgccacaggatactggcgcgcatacacagcacatctctttgcaggaaaaaaacgctatgaaaaatgttggttttatcggctggcgcggaatggtcggctctgttctcatgcaacgcatggtagaggagcgcgatttcgacgctattcgccctgttttcttttctacctcccagtttggacaggcggcgcccaccttcggcgacacctccaccggcacgctacaggacgcttttgatctggatgcgctaaaagcgctcgatatcatcgtgacctgccagggcggcgattataccaacgaaatttatccaaagctgcgcgaaagcggatggcagggttactggattgatgcggcttctacgctgcgcatgaaagatgatgccattattattctcgacccggtcaaccaggacgtgattaccgacggcct

SEQ ID NO: 523 - DNA, 5847 bp, synthetic construct
  misc_feature 1..5847: note = Synthetic DNA construct
  regulatory 1704..2007: note = enhancer - CMV; regulatory_class = enhancer
  regulatory 2008..2211: note = promoter - CMV promoter; regulatory_class = promoter
  gene 2308..2868: note = hIFNa2 NM_000605.4
  misc_feature 2869..2877: note = GGS Linker
  gene 2878..2931: note = T2A
  gene 2932..3489: note = huIFNb
  misc_feature 3503..4036: note = HPRE
  regulatory 4067..4188: note = polyA_signal - SV40 poly(A) signal; regulatory_class = polyA_signal_sequence
  source 1..5847: mol_type = other DNA
  regulatory 2197..2203: note = TATA signal; regulatory_class = TATA_box
  misc_feature 2299..2304: note = Kozak sequence
  rep_origin 822..1410
  5'UTR 2212..2298
gaacaatggcgtgaagacctttgtgggcggtaactgtaccgttagcctgatgttgatgtcgctgggcggtctctttgcccataatctcgttgactgggtatccgtcgcgacctatcaggccgcctccggcggcggcgcgcgccatatgcgcgagctgttaacccagatgggtcagttgtatggccatgtcgccgatgaactggcgacgccgtcttccgcaattcttgatattgaacgcaaagttacggcattgacccgcagcggcgagctgccggttgataactttggcgtaccgctggcgggaagcctgatcccctggatcgacaaacagctcgataacggccagagccgcgaagagtggaaaggccaggcggaaaccaacaagattctcaatactgcctctgtgattccggttgatggtttgtgtgtgcgcgtcggcgcgctgcgctgtcacagccaggcgttcaccatcaagctgaaaaaagaggtatccattccgacggtggaagaactgctggcggcacataatccgtgggcgaaagtggtgccgaacgatcgtgatatcactatgcgcgaattaaccccggcggcggtgaccggcacgttgactacgccggttggtcgtctgcgtaagctgaacatggggccagagttcttgtcggcgtttaccgtaggcgaccagttgttatggggcgccgccgagccgctgcgtcgaatgctgcgccagttggcgtagttgataatctcatgaccaaaatcccttaacgtgagttttcgttccactgagcgtcagaccccgtagaaaagatcaaaggatcttcttgagatcctttttttctgcgcgtaatctgctgcttgcaaacaaaaaaaccaccgctaccagcggtggtttgtttgccggatcaagagctaccaactctttttccgaaggtaactggcttcagcagagcgcagataccaaatactgtccttctagtgtagccgtagttaggccaccacttcaagaactctgtagcaccgcctacatacctcgctctgctaatcctgttaccagtggctgctgccagtggcgataagtcgtgtcttaccgggttggactcaagacgatagttaccggataaggcgcagcggtcgggctgaacggggggttcgtgcacacagcccagcttggagcgaacgacctacaccgaactgagatacctacagcgtgagctatgagaaagcgccacgcttcccgaagggagaaaggcggacaggtatccggtaagcggcagggtcggaacaggagagcgcacgagggagcttccagggggaaacgcctggtatctttatagtcctgtcgggtttcgccacctctgacttgagcgtcgatttttgtgatgctcgtcaggggggcggagcctatggaaaaacgccagcaacgcggcctttttacggttcctggccttttgctggccttttgctcacatgttctttcctgcgttatcccctgattctgtggataaccgtattaccgcctttgagtgagctgataccgctcgccgcagccgaacgaccgagcgcagcgagtcagtgagcgaggaagcggtagagcgcccaatacgcaaaccgcctctccccgcgcgttggccgattcattaatgcagctggcacgacaggtttcccgactggaaagcgggcagtgagcgcaacgcaagtcgacccgttacataacttacggtaaatggcccgcctggctgaccgcccaacgacccccgcccattgacgtcaataatgacgtatgttcccatagtaacgccaatagggactttccattgacgtcaatgggtggagtatttacggtaaactgcccacttggcagtacatcaagtgtatcatatgccaagtacgccccctattgacgtcaatgacggtaaatggcccgcctggcattatgcccagtacatgaccttatgggactttcctacttggcagtacatctacgtattagtcatcgctattaccatggtgatgcggttttggcagtacatcaatgggcgtggatagcggtttgactcacggggatttccaagtctccaccccattgacgtcaatgggagtttgttttggcaccaaaatcaacgggactttccaaaatgtcgtaacaactccgccccattgacgcaaatgggcggtaggcgtgtacggtgggaggtctatataagcagagctggtttagtgaaccgtcagatccgctagcgattacgccaagctcgtctagacggcggccaagcttggcaatccggtactgttggtaaagccaccatggccttgacctttgctttactggtggccctcctggtgctcagctgcaagtcaagctgctctgtgggctgtgatctgcctcaaacccacagcctgggtagcaggaggaccttgatgctcctggcacagatgaggagaatctctcttttctcctgcttgaaggacagacatgactttggatttccccaggaggagtttggcaaccagttccaaaaggctgaaaccatccctgtcctccatgagatgatccagcagatcttcaatctcttcagcacaaaggactcatctgctgcttgggatgagaccctcctagacaaattctacactgaactctaccagcagctgaatgacctggaagcctgtgtgatacagggggtgggggtgacagagactcccctgatgaaggaggactccattctggctgtgaggaaatacttccaaagaatcactctctatctgaaagagaagaaatacagcccttgtgcctgggaggttgtcagagcagaaatcatgagatctttttctttgtcaacaaacttgcaagaaagtttaagaagtaaggaaggatcaggcgagggaagaggctcgcttctgacttgcggcgatgtcgaggaaaacccgggacctaccaacaagtgtctcctccaaattgctctcctgttgtgcttctccactacagctctttccatgagctacaacttgcttggattcctacaaagaagcagcaattttcagtgtcagaagctcctgtggcaattgaatgggaggcttgaatactgcctcaaggacaggatgaactttgacatccctgaggagattaagcagctgcagcagttccagaaggaggacgccgcattgaccatctatgagatgctccagaacatctttgctattttcagacaagattcatctagcactggctggaatgagactattgttgagaacctcctggctaatgtctatcatcagataaaccatctgaagacagtcctggaagaaaaactggagaaagaagatttcaccaggggaaaactcatgagcagtctgcacctgaaaagatattatgggaggattctgcattacctgaaggccaaggagtacagtcactgtgcctggaccatagtcagagtggaaatcctaaggaacttttacttcattaacagacttacaggttacctccgaaactgaaaccggtatgttgctcggcaacggcctggtctgtgccaagtgtttgctgacgcaacccccactggctggggcttggccataggccatcagcgcatgcgtggaacctttgtggctcctctgccgatccatactgcggaactcctagccgcttgttttgctcgcagccggtctggggcaaagctcatcggaactgacaattctgtcgtcctctcgcggaaatatacatcgtttccatggctgctaggttgtactgccaactgcatccttcgcgggacgtcctttgtttacgtcccgtcggcgctgaatcccgcggacgacccctctcggggccgcttgggactctctcgtccccttctccgtctgccgttccagccgaccacggggcgcacctctctttacgcggtctccccgtctgtgccttctcatctgccggtccgtgtgcacttcgcttcacctctgcacgttgcatggagaccaccgtgaacgcccatcagatcctgcccaaggtcttacataagaggactcttggactcccagcaatgtcggcgcgccctggctagctggccagacatgataagatacattgatgagtttggacaaaccacaactagaatgcagtgaaaaaaatgctttatttgtgaaatttgtgatgctattgctttatttgtaaccattataagctgcaataaacaagttccctgacgggcttgtctgctcccggcatccgcttacagacaagctgtgaccgtctccgggagctgcatgtgtcagaggttttcaccgtcatcaccgaaacgcgcgagacgaaagggcctcgtgatacgcctatttttataggttaatgtcatgataataatggtttcttagacgtcaggtggcacttttcggggaaatgtgaagctttagaaaaactcatcgagcatcaaatgaaactgcaatttattcatatcaggattatcaataccatatttttgaaaaagccgtttctgtaatgaaggagaaaactcaccgaggcagttccataggatggcaagatcctggtatcggtctgcgattccgactcgtccaacatcaatacaacctattaatttcccctcgtcaaaaataaggttatcaagtgagaaatcaccatgagtgacgactgaatccggtgagaatggcaaaagtttatgcatttctttccagacttgttcaacaggccagccattacgctcgtcatcaaaatcactcgcatcaaccaaaccgttattcattcgtgattgcgcctgagcgagacgaaatacgcgatcgctgttaaaaggacaattacaaacaggaatcgaatgcaaccggcgcaggaacactgccagcgcatcaacaatattttcacctgaatcaggatattcttctaatacctggaatgctgtttttccggggatcgcagtggtgagtaaccatgcatcatcaggagtacggataaaatgcttgatggtcggaagaggcataaattccgtcagccagtttagtctgaccatctcatctgtaacatcattggcaacgctacctttgccatgtttcagaaacaactctggcgcatcgggcttcccatacaagcgatagattgtcgcacctgattgcccgacattatcgcgagcccatttatacccatataaatcagcatccatgttggaatttaatcgcggcctcgacgtttcccgttgaatatggctcataacaccccttgtattactgtttatgtaagcagacagttttattgttcatgatgatatatttttatcttgtgcaatgtaacatcagagattttgagacacgggccagagctgcaagcttctgtcagaccaagtttactcatatatactttagattgatttaaaacttcatttttaatttaaaaggatctaggtgaagatcctttatggtgaaggatgcgccacaggatactggcgcgcatacacagcacatctctttgcaggaaaaaaacgctatgaaaaatgttggttttatcggctggcgcggaatggtcggctctgttctcatgcaacgcatggtagaggagcgcgatttcgacgctattcgccctgttttcttttctacctcccagtttggacaggcggcgcccaccttcggcgacacctccaccggcacgctacaggacgcttttgatctggatgcgctaaaagcgctcgatatcatcgtgacctgccagggcggcgattataccaacgaaatttatccaaagctgcgcgaaagcggatggcagggttactggattgatgcggcttctacgctgcgcatgaaagatgatgccattattattctcgacccggtcaaccaggacgtgattaccgacggcct

SEQ ID NO: 524 - DNA, 6519 bp, synthetic construct
  misc_feature 1..6519: note = Synthetic DNA construct
  regulatory 1704..2007: note = enhancer - CMV; regulatory_class = enhancer
  regulatory 2008..2211: note = promoter - CMV promoter; regulatory_class = promoter
  gene 2308..2868: note = hIFNa2 NM_000605.4 opt 36
  regulatory 2872..3461: note = RBS - VCIP IRES ATUM; regulatory_class = ribosome_binding_site
  gene 3465..4022: note = huIFNb opt 36
  misc_feature 4036..4569: note = HPRE
  regulatory 4578..4802: note = polyA_signal - bGH poly(A) signal; regulatory_class = polyA_signal_sequence
  misc_feature 4781..4860: note = Duplexed DNA insert
  source 1..6519: mol_type = other DNA
  rep_origin 822..1410
  regulatory 2197..2203: note = TATA signal; regulatory_class = TATA_box
  misc_feature 2299..2304: note = Kozak sequence
  5'UTR 2212..2298
gaacaatggcgtgaagacctttgtgggcggtaactgtaccgttagcctgatgttgatgtcgctgggcggtctctttgcccataatctcgttgactgggtatccgtcgcgacctatcaggccgcctccggcggcggcgcgcgccatatgcgcgagctgttaacccagatgggtcagttgtatggccatgtcgccgatgaactggcgacgccgtcttccgcaattcttgatattgaacgcaaagttacggcattgacccgcagcggcgagctgccggttgataactttggcgtaccgctggcgggaagcctgatcccctggatcgacaaacagctcgataacggccagagccgcgaagagtggaaaggccaggcggaaaccaacaagattctcaatactgcctctgtgattccggttgatggtttgtgtgtgcgcgtcggcgcgctgcgctgtcacagccaggcgttcaccatcaagctgaaaaaagaggtatccattccgacggtggaagaactgctggcggcacataatccgtgggcgaaagtggtgccgaacgatcgtgatatcactatgcgcgaattaaccccggcggcggtgaccggcacgttgactacgccggttggtcgtctgcgtaagctgaacatggggccagagttcttgtcggcgtttaccgtaggcgaccagttgttatggggcgccgccgagccgctgcgtcgaatgctgcgccagttggcgtagttgataatctcatgaccaaaatcccttaacgtgagttttcgttccactgagcgtcagaccccgtagaaaagatcaaaggatcttcttgagatcctttttttctgcgcgtaatctgctgcttgcaaacaaaaaaaccaccgctaccagcggtggtttgtttgccggatcaagagctaccaactctttttccgaaggtaactggcttcagcagagcgcagataccaaatactgtccttctagtgtagccgtagttaggccaccacttcaagaactctgtagcaccgcctacatacctcgctctgctaatcctgttaccagtggctgctgccagtggcgataagtcgtgtcttaccgggttggactcaagacgatagttaccggataaggcgcagcggtcgggctgaacggggggttcgtgcacacagcccagcttggagcgaacgacctacaccgaactgagatacctacagcgtgagctatgagaaagcgccacgcttcccgaagggagaaaggcggacaggtatccggtaagcggcagggtcggaacaggagagcgcacgagggagcttccagggggaaacgcctggtatctttatagtcctgtcgggtttcgccacctctgacttgagcgtcgatttttgtgatgctcgtcaggggggcggagcctatggaaaaacgccagcaacgcggcctttttacggttcctggccttttgctggccttttgctcacatgttctttcctgcgttatcccctgattctgtggataaccgtattaccgcctttgagtgagctgataccgctcgccgcagccgaacgaccgagcgcagcgagtcagtgagcgaggaagcggtagagcgcccaatacgcaaaccgcctctccccgcgcgttggccgattcattaatgcagctggcacgacaggtttcccgactggaaagcgggcagtgagcgcaacgcaagtcgacccgttacataacttacggtaaatggcccgcctggctgaccgcccaacgacccccgcccattgacgtcaataatgacgtatgttcccatagtaacgccaatagggactttccattgacgtcaatgggtggagtatttacggtaaactgcccacttggcagtacatcaagtgtatcatatgccaagtacgccccctattgacgtcaatgacggtaaatggcccgcctggcattatgcccagtacatgaccttatgggactttcctacttggcagtacatctacgtattagtcatcgctattaccatggtgatgcggttttggcagtacatcaatgggcgtggatagcggtttgactcacggggatttccaagtctccaccccattgacgtcaatgggagtttgttttggcaccaaaatcaacgggactttccaaaatgtcgtaacaactccgccccattgacgcaaatgggcggtaggcgtgtacggtgggaggtctatataagcagagctggtttagtgaaccgtcagatccgctagcgattacgccaagctcgtctagacggcggccaagcttggcaatccggtactgttggtaaagccaccatggccctcacctttgctttactggtggccctgctggtgctgagctgcaagtccagctgcagcgtgggctgtgatctgcctcaaacccacagcctggggagcaggaggaccttgatgctgctggcccagatgaggagaatcagcctgttcagctgcctgaaggacagacacgactttggattcccccaggaggagtttggcaaccagttccaaaaggctgagaccatccccgtgctgcacgagatgatccagcagatcttcaacctgttcagcacaaaggacagctccgctgcttgggatgagaccctgctagacaaattctacaccgagctgtaccagcagctgaacgacctggaggcctgcgtgatacagggggtgggcgtgacagagactcccctgatgaaggaggactccattctggctgtgaggaagtacttccagagaatcaccctgtatctgaaagagaagaaatacagcccatgcgcctgggaggtggtgagagctgaaatcatgagatccttctccttgagcacaaacctccaagaaagtttaagaagcaaggaatgatgatagtggcagtttatggcgggcgtcctgcccgccaccctccagaaaacaaacccaggcgatcacagcagcagccgccgcggcagcagcaccaacagcaggaggagcaggaggagccggaggaggaggaggaggaggaggcaaagttagagttggggctggcgctccggagttgctgggctcagcgcagctcccattcattaaggaaccagctgcggaggaaggtggccgagcgcccgcgctgcccactcgctcgctcgcgcactcagacgcgcgccacaacagcgcgccccaagctgcgcagctctgcaaaagtttctgctcgggatctggctctcttccccttggactttagaacgatttagggttgacagaggaaagcagaggcgcgcaggaggagcagaaaacaccaccttctgcagttggaggcaggcagccccggctgcactctagccgccgcgcccggagccggggccgacccgccactatccgcagcagcctcggccaggaggcgacccgggcgcctgggtgtgtggctgctgttgcgggacgtcttcgcggggcgggaggctcgcgccgcagccagcgccatgaccaacaagtgtctccttcagattgcactgctgttgtgcttctccaccacagctctctccatgagctacaacctgcttggattcctgcaaagaagcagcaatttccagtgccagaagctcctgtggcaattgaatgggaggcttgagtactgcctcaaggatcggatgaacttcgacatccccgaggagattaagcagctgcagcagttccagaaggaggacgccgccctgaccatctacgagatgctgcagaacatcttcgccatcttcagacaggacagctccagcaccggctggaatgagactatcgtggagaatctgctggccaacgtgtaccatcagatcaaccacctgaagacagtgctggaggagaagctggagaaggaagacttcaccaggggcaaactgatgagctctctgcacctgaagagatattacggcaggatcctgcactacctgaaggccaaggagtacagtcactgtgcctggaccattgtgagagtggagatcctgaggaacttctacttcatcaacagactgaccggctacctgaggaactgaaaccggtatgttgctcggcaacggcctggtctgtgccaagtgtttgctgacgcaacccccactggctggggcttggccataggccatcagcgcatgcgtggaacctttgtggctcctctgccgatccatactgcggaactcctagccgcttgttttgctcgcagccggtctggggcaaagctcatcggaactgacaattctgtcgtcctctcgcggaaatatacatcgtttccatggctgctaggttgtactgccaactgcatccttcgcgggacgtcctttgtttacgtcccgtcggcgctgaatcccgcggacgacccctctcggggccgcttgggactctctcgtccccttctccgtctgccgttccagccgaccacggggcgcacctctctttacgcggtctccccgtctgtgccttctcatctgccggtccgtgtgcacttcgcttcacctctgcacgttgcatggagaccaccgtgaacgcccatcagatcctgcccaaggtcttacataagaggactcttggactcccagcaatgtcggcgcgccctgtgccttctagttgccagccatctgttgtttgcccctcccccgtgccttccttgaccctggaaggtgccactcccactgtcctttcctaataaaatgaggaaattgcatcgcattgtctgagtaggtgtcattctattctggggggtggggtggggcaggacagcaagggggaggattgggaagacaatagcaggcatgctggggatgcggtgggctctatggggatccgctccggctcgagttaagccagccccgacacccgccaacacccgctgacgcgccctgacgggcttgtctgctcccggcatccgcttacagacaagctgtgaccgtctccgggagctgcatgtgtcagaggttttcaccgtcatcaccgaaacgcgcgagacgaaagggcctcgtgatacgcctatttttataggttaatgtcatgataataatggtttcttagacgtcaggtggcacttttcggggaaatgtgaagctttagaaaaactcatcgagcatcaaatgaaactgcaatttattcatatcaggattatcaataccatatttttgaaaaagccgtttctgtaatgaaggagaaaactcaccgaggcagttccataggatggcaagatcctggtatcggtctgcgattccgactcgtccaacatcaatacaacctattaatttcccctcgtcaaaaataaggttatcaagtgagaaatcaccatgagtgacgactgaatccggtgagaatggcaaaagtttatgcatttctttccagacttgttcaacaggccagccattacgctcgtcatcaaaatcactcgcatcaaccaaaccgttattcattcgtgattgcgcctgagcgagacgaaatacgcgatcgctgttaaaaggacaattacaaacaggaatcgaatgcaaccggcgcaggaacactgccagcgcatcaacaatattttcacctgaatcaggatattcttctaatacctggaatgctgtttttccggggatcgcagtggtgagtaaccatgcatcatcaggagtacggataaaatgcttgatggtcggaagaggcataaattccgtcagccagtttagtctgaccatctcatctgtaacatcattggcaacgctacctttgccatgtttcagaaacaactctggcgcatcgggcttcccatacaagcgatagattgtcgcacctgattgcccgacattatcgcgagcccatttatacccatataaatcagcatccatgttggaatttaatcgcggcctcgacgtttcccgttgaatatggctcataacaccccttgtattactgtttatgtaagcagacagttttattgttcatgatgatatatttttatcttgtgcaatgtaacatcagagattttgagacacgggccagagctgcaagcttctgtcagaccaagtttactcatatatactttagattgatttaaaacttcatttttaatttaaaaggatctaggtgaagatcctttatggtgaaggatgcgccacaggatactggcgcgcatacacagcacatctctttgcaggaaaaaaacgctatgaaaaatgttggttttatcggctggcgcggaatggtcggctctgttctcatgcaacgcatggtagaggagcgcgatttcgacgctattcgccctgttttcttttctacctcccagtttggacaggcggcgcccaccttcggcgacacctccaccggcacgctacaggacgcttttgatctggatgcgctaaaagcgctcgatatcatcgtgacctgccagggcggcgattataccaacgaaatttatccaaagctgcgcgaaagcggatggcagggttactggattgatgcggcttctacgctgcgcatgaaagatgatgccattattattctcgacccggtcaaccaggacgtgattaccgacggcct

SEQ ID NO: 525 - DNA, 6519 bp, synthetic construct
  misc_feature 1..6519: note = Synthetic DNA construct
  regulatory 1704..2007: note = enhancer - CMV; regulatory_class = enhancer
  regulatory 2008..2211: note = promoter - CMV promoter; regulatory_class = promoter
  gene 2308..2868: note = hIFNa2 NM_000605.4
  regulatory 2872..3461: note = RBS - VCIP IRES ATUM; regulatory_class = ribosome_binding_site
  gene 3465..4022: note = huIFNb
  misc_feature 4036..4569: note = HPRE
  regulatory 4578..4802: note = polyA_signal - bGH poly(A) signal; regulatory_class = polyA_signal_sequence
  misc_feature 4781..4860: note = Duplexed DNA insert
  source 1..6519: mol_type = other DNA
  regulatory 2197..2203: note = TATA signal; regulatory_class = TATA_box
  misc_feature 2299..2304: note = Kozak sequence
  rep_origin 822..1410
  5'UTR 2212..2298
gaacaatggcgtgaagacctttgtgggcggtaactgtaccgttagcctgatgttgatgtcgctgggcggtctctttgcccataatctcgttgactgggtatccgtcgcgacctatcaggccgcctccggcggcggcgcgcgccatatgcgcgagctgttaacccagatgggtcagttgtatggccatgtcgccgatgaactggcgacgccgtcttccgcaattcttgatattgaacgcaaagttacggcattgacccgcagcggcgagctgccggttgataactttggcgtaccgctggcgggaagcctgatcccctggatcgacaaacagctcgataacggccagagccgcgaagagtggaaaggccaggcggaaaccaacaagattctcaatactgcctctgtgattccggttgatggtttgtgtgtgcgcgtcggcgcgctgcgctgtcacagccaggcgttcaccatcaagctgaaaaaagaggtatccattccgacggtggaagaactgctggcggcacataatccgtgggcgaaagtggtgccgaacgatcgtgatatcactatgcgcgaattaaccccggcggcggtgaccggcacgttgactacgccggttggtcgtctgcgtaagctgaacatggggccagagttcttgtcggcgtttaccgtaggcgaccagttgttatggggcgccgccgagccgctgcgtcgaatgctgcgccagttggcgtagttgataatctcatgaccaaaatcccttaacgtgagttttcgttccactgagcgtcagaccccgtagaaaagatcaaaggatcttcttgagatcctttttttctgcgcgtaatctgctgcttgcaaacaaaaaaaccaccgctaccagcggtggtttgtttgccggatcaagagctaccaactctttttccgaaggtaactggcttcagcagagcgcagataccaaatactgtccttctagtgtagccgtagttaggccaccacttcaagaactctgtagcaccgcctacatacctcgctctgctaatcctgttaccagtggctgctgccagtggcgataagtcgtgtcttaccgggttggactcaagacgatagttaccggataaggcgcagcggtcgggctgaacggggggttcgtgcacacagcccagcttggagcgaacgacctacaccgaactgagatacctacagcgtgagctatgagaaagcgccacgcttcccgaagggagaaaggcggacaggtatccggtaagcggcagggtcggaacaggagagcgcacgagggagcttccagggggaaacgcctggtatctttatagtcctgtcgggtttcgccacctctgacttgagcgtcgatttttgtgatgctcgtcaggggggcggagcctatggaaaaacgccagcaacgcggcctttttacggttcctggccttttgctggccttttgctcacatgttctttcctgcgttatcccctgattctgtggataaccgtattaccgcctttgagtgagctgataccgctcgccgcagccgaacgaccgagcgcagcgagtcagtgagcgaggaagcggtagagcgcccaatacgcaaaccgcctctccccgcgcgttggccgattcattaatgcagctggcacgacaggtttcccgactggaaagcgggcagtgagcgcaacgcaagtcgacccgttacataacttacggtaaatggcccgcctggctgaccgcccaacgacccccgcccattgacgtcaataatgacgtatgttcccatagtaacgccaatagggactttccattgacgtcaatgggtggagtatttacggtaaactgcccacttggcagtacatcaagtgtatcatatgccaagtacgccccctattgacgtcaatgacggtaaatggcccgcctggcattatgcccagtacatgaccttatgggactttcctacttggcagtacatctacgtattagtcatcgctattaccatggtgatgcggttttggcagtacatcaatgggcgtggatagcggtttgactcacggggatttccaagtctccaccccattgacgtcaatgggagtttgttttggcaccaaaatcaacgggactttccaaaatgtcgtaacaactccgccccattgacgcaaatgggcggtaggcgtgtacggtgggaggtctatataagcagagctggtttagtgaaccgtcagatccgctagcgattacgccaagctcgtctagacggcggccaagcttggcaatccggtactgttggtaaagccaccatggccttgacctttgctttactggtggccctcctggtgctcagctgcaagtcaagctgctctgtgggctgtgatctgcctcaaacccacagcctgggtagcaggaggaccttgatgctcctggcacagatgaggagaatctctcttttctcctgcttgaaggacagacatgactttggatttccccaggaggagtttggcaaccagttccaaaaggctgaaaccatccctgtcctccatgagatgatccagcagatcttcaatctcttcagcacaaaggactcatctgctgcttgggatgagaccctcctagacaaattctacactgaactctaccagcagctgaatgacctggaagcctgtgtgatacagggggtgggggtgacagagactcccctgatgaaggaggactccattctggctgtgaggaaatacttccaaagaatcactctctatctgaaagagaagaaatacagcccttgtgcctgggaggttgtcagagcagaaatcatgagatctttttctttgtcaacaaacttgcaagaaagtttaagaagtaaggaatgatgatagtggcagtttatggcgggcgtcctgcccgccaccctccagaaaacaaacccaggcgatcacagcagcagccgccgcggcagcagcaccaacagcaggaggagcaggaggagccggaggaggaggaggaggaggaggcaaagttagagttggggctggcgctccggagttgctgggctcagcgcagctcccattcattaaggaaccagctgcggaggaaggtggccgagcgcccgcgctgcccactcgctcgctcgcgcactcagacgcgcgccacaacagcgcgccccaagctgcgcagctctgcaaaagtttctgctcgggatctggctctcttccccttggactttagaacgatttagggttgacagaggaaagcagaggcgcgcaggaggagcagaaaacaccaccttctgcagttggaggcaggcagccccggctgcactctagccgccgcgcccggagccggggccgacccgccactatccgcagcagcctcggccaggaggcgacccgggcgcctgggtgtgtggctgctgttgcgggacgtcttcgcggggcgggaggctcgcgccgcagccagcgccatgaccaacaagtgtctcctccaaattgctctcctgttgtgcttctccactacagctctttccatgagctacaacttgcttggattcctacaaagaagcagcaattttcagtgtcagaagctcctgtggcaattgaatgggaggcttgaatactgcctcaaggacaggatgaactttgacatccctgaggagattaagcagctgcagcagttccagaaggaggacgccgcattgaccatctatgagatgctccagaacatctttgctattttcagacaagattcatctagcactggctggaatgagactattgttgagaacctcctggctaatgtctatcatcagataaaccatctgaagacagtcctggaagaaaaactggagaaagaagatttcaccaggggaaaactcatgagcagtctgcacctgaaaagatattatgggaggattctgcattacctgaaggccaaggagtacagtcactgtgcctggaccatagtcagagtggaaatcctaaggaacttttacttcattaacagacttacaggttacctccgaaactgaaaccggtatgttgctcggcaacggcctggtctgtgccaagtgtttgctgacgcaacccccactggctggggcttggccataggccatcagcgcatgcgtggaacctttgtggctcctctgccgatccatactgcggaactcctagccgcttgttttgctcgcagccggtctggggcaaagctcatcggaactgacaattctgtcgtcctctcgcggaaatatacatcgtttccatggctgctaggttgtactgccaactgcatccttcgcgggacgtcctttgtttacgtcccgtcggcgctgaatcccgcggacgacccctctcggggccgcttgggactctctcgtccccttctccgtctgccgttccagccgaccacggggcgcacctctctttacgcggtctccccgtctgtgccttctcatctgccggtccgtgtgcacttcgcttcacctctgcacgttgcatggagaccaccgtgaacgcccatcagatcctgcccaaggtcttacataagaggactcttggactcccagcaatgtcggcgcgccctgtgccttctagttgccagccatctgttgtttgcccctcccccgtgccttccttgaccctggaaggtgccactcccactgtcctttcctaataaaatgaggaaattgcatcgcattgtctgagtaggtgtcattctattctggggggtggggtggggcaggacagcaagggggaggattgggaagacaatagcaggcatgctggggatgcggtgggctctatggggatccgctccggctcgagttaagccagccccgacacccgccaacacccgctgacgcgccctgacgggcttgtctgctcccggcatccgcttacagacaagctgtgaccgtctccgggagctgcatgtgtcagaggttttcaccgtcatcaccgaaacgcgcgagacgaaagggcctcgtgatacgcctatttttataggttaatgtcatgataataatggtttcttagacgtcaggtggcacttttcggggaaatgtgaagctttagaaaaactcatcgagcatcaaatgaaactgcaatttattcatatcaggattatcaataccatatttttgaaaaagccgtttctgtaatgaaggagaaaactcaccgaggcagttccataggatggcaagatcctggtatcggtctgcgattccgactcgtccaacatcaatacaacctattaatttcccctcgtcaaaaataaggttatcaagtgagaaatcaccatgagtgacgactgaatccggtgagaatggcaaaagtttatgcatttctttccagacttgttcaacaggccagccattacgctcgtcatcaaaatcactcgcatcaaccaaaccgttattcattcgtgattgcgcctgagcgagacgaaatacgcgatcgctgttaaaaggacaattacaaacaggaatcgaatgcaaccggcgcaggaacactgccagcgcatcaacaatattttcacctgaatcaggatattcttctaatacctggaatgctgtttttccggggatcgcagtggtgagtaaccatgcatcatcaggagtacggataaaatgcttgatggtcggaagaggcataaattccgtcagccagtttagtctgaccatctcatctgtaacatcattggcaacgctacctttgccatgtttcagaaacaactctggcgcatcgggcttcccatacaagcgatagattgtcgcacctgattgcccgacattatcgcgagcccatttatacccatataaatcagcatccatgttggaatttaatcgcggcctcgacgtttcccgttgaatatggctcataacaccccttgtattactgtttatgtaagcagacagttttattgttcatgatgatatatttttatcttgtgcaatgtaacatcagagattttgagacacgggccagagctgcaagcttctgtcagaccaagtttactcatatatactttagattgatttaaaacttcatttttaatttaaaaggatctaggtgaagatcctttatggtgaaggatgcgccacaggatactggcgcgcatacacagcacatctctttgcaggaaaaaaacgctatgaaaaatgttggttttatcggctggcgcggaatggtcggctctgttctcatgcaacgcatggtagaggagcgcgatttcgacgctattcgccctgttttcttttctacctcccagtttggacaggcggcgcccaccttcggcgacacctccaccggcacgctacaggacgcttttgatctggatgcgctaaaagcgctcgatatcatcgtgacctgccagggcggcgattataccaacgaaatttatccaaagctgcgcgaaagcggatggcagggttactggattgatgcggcttctacgctgcgcatgaaagatgatgccattattattctcgacccggtcaaccaggacgtgattaccgacggcct

SEQ ID NO: 526 - DNA, 6380 bp, synthetic construct
  misc_feature 1..6380: note = Synthetic DNA construct
  regulatory 1704..2007: note = enhancer - CMV; regulatory_class = enhancer
  regulatory 2008..2211: note = promoter - CMV promoter; regulatory_class = promoter
  gene 2308..2868: note = hIFNa2 NM_000605.4 opt 36
  regulatory 2872..3461: note = RBS - VCIP IRES ATUM; regulatory_class = ribosome_binding_site
  gene 3465..4022: note = huIFNb opt 36
  misc_feature 4036..4569: note = HPRE
  regulatory 4600..4721: note = polyA_signal - SV40 poly(A) signal; regulatory_class = polyA_signal_sequence
  source 1..6380: mol_type = other DNA
  rep_origin 822..1410
  misc_feature 2299..2304: note = Kozak sequence
  regulatory 2197..2203: note = TATA signal; regulatory_class = TATA_box
  5'UTR 2212..2298
gaacaatggcgtgaagacctttgtgggcggtaactgtaccgttagcctgatgttgatgtcgctgggcggtctctttgcccataatctcgttgactgggtatccgtcgcgacctatcaggccgcctccggcggcggcgcgcgccatatgcgcgagctgttaacccagatgggtcagttgtatggccatgtcgccgatgaactggcgacgccgtcttccgcaattcttgatattgaacgcaaagttacggcattgacccgcagcggcgagctgccggttgataactttggcgtaccgctggcgggaagcctgatcccctggatcgacaaacagctcgataacggccagagccgcgaagagtggaaaggccaggcggaaaccaacaagattctcaatactgcctctgtgattccggttgatggtttgtgtgtgcgcgtcggcgcgctgcgctgtcacagccaggcgttcaccatcaagctgaaaaaagaggtatccattccgacggtggaagaactgctggcggcacataatccgtgggcgaaagtggtgccgaacgatcgtgatatcactatgcgcgaattaaccccggcggcggtgaccggcacgttgactacgccggttggtcgtctgcgtaagctgaacatggggccagagttcttgtcggcgtttaccgtaggcgaccagttgttatggggcgccgccgagccgctgcgtcgaatgctgcgccagttggcgtagttgataatctcatgaccaaaatcccttaacgtgagttttcgttccactgagcgtcagaccccgtagaaaagatcaaaggatcttcttgagatcctttttttctgcgcgtaatctgctgcttgcaaacaaaaaaaccaccgctaccagcggtggtttgtttgccggatcaagagctaccaactctttttccgaaggtaactggcttcagcagagcgcagataccaaatactgtccttctagtgtagccgtagttaggccaccacttcaagaactctgtagcaccgcctacatacctcgctctgctaatcctgttaccagtggctgctgccagtggcgataagtcgtgtcttaccgggttggactcaagacgatagttaccggataaggcgcagcggtcgggctgaacggggggttcgtgcacacagcccagcttggagcgaacgacctacaccgaactgagatacctacagcgtgagctatgagaaagcgccacgcttcccgaagggagaaaggcggacaggtatccggtaagcggcagggtcggaacaggagagcgcacgagggagcttccagggggaaacgcctggtatctttatagtcctgtcgggtttcgccacctctgacttgagcgtcgatttttgtgatgctcgtcaggggggcggagcctatggaaaaacgccagcaacgcggcctttttacggttcctggccttttgctggccttttgctcacatgttctttcctgcgttatcccctgattctgtggataaccgtattaccgcctttgagtgagctgataccgctcgccgcagccgaacgaccgagcgcagcgagtcagtgagcgaggaagcggtagagcgcccaatacgcaaaccgcctctccccgcgcgttggccgattcattaatgcagctggcacgacaggtttcccgactggaaagcgggcagtgagcgcaacgcaagtcgacccgttacataacttacggtaaatggcccgcctggctgaccgcccaacgacccccgcccattgacgtcaataatgacgtatgttcccatagtaacgccaatagggactttccattgacgtcaatgggtggagtatttacggtaaactgcccacttggcagtacatcaagtgtatcatatgccaagtacgccccctattgacgtcaatgacggtaaatggcccgcctggcattatgcccagtacatgaccttatgggactttcctacttggcagtacatctacgtattagtcatcgctattaccatggtgatgcggttttggcagtacatcaatgggcgtggatagcggtttgactcacggggatttccaagtctccaccccattgacgtcaatgggagtttgttttggcaccaaaatcaacgggactttccaaaatgtcgtaacaactccgccccattgacgcaaatgggcggtaggcgtgtacggtgggaggtctatataagcagagctggtttagtgaaccgtcagatccgctagcgattacgccaagctcgtctagacggcggccaagcttggcaatccggtactgttggtaaagccaccatggccctcacctttgctttactggtggccctgctggtgctgagctgcaagtccagctgcagcgtgggctgtgatctgcctcaaacccacagcctggggagcaggaggaccttgatgctgctggcccagatgaggagaatcagcctgttcagctgcctgaaggacagacacgactttggattcccccaggaggagtttggcaaccagttccaaaaggctgagaccatccccgtgctgcacgagatgatccagcagatcttcaacctgttcagcacaaaggacagctccgctgcttgggatgagaccctgctagacaaattctacaccgagctgtaccagcagctgaacgacctggaggcctgcgtgatacagggggtgggcgtgacagagactcccctgatgaaggaggactccattctggctgtgaggaagtacttccagagaatcaccctgtatctgaaagagaagaaatacagcccatgcgcctgggaggtggtgagagctgaaatcatgagatccttctccttgagcacaaacctccaagaaagtttaagaagcaaggaatgatgatagtggcagtttatggcgggcgtcctgcccgccaccctccagaaaacaaacccaggcgatcacagcagcagccgccgcggcagcagcaccaacagcaggaggagcaggaggagccggaggaggaggaggaggaggaggcaaagttagagttggggctggcgctccggagttgctgggctcagcgcagctcccattcattaaggaaccagctgcggaggaaggtggccgagcgcccgcgctgcccactcgctcgctcgcgcactcagacgcgcgccacaacagcgcgccccaagctgcgcagctctgcaaaagtttctgctcgggatctggctctcttccccttggactttagaacgatttagggttgacagaggaaagcagaggcgcgcaggaggagcagaaaacaccaccttctgcagttggaggcaggcagccccggctgcactctagccgccgcgcccggagccggggccgacccgccactatccgcagcagcctcggccaggaggcgacccgggcgcctgggtgtgtggctgctgttgcgggacgtcttcgcggggcgggaggctcgcgccgcagccagcgccatgaccaacaagtgtctccttcagattgcactgctgttgtgcttctccaccacagctctctccatgagctacaacctgcttggattcctgcaaagaagcagcaatttccagtgccagaagctcctgtggcaattgaatgggaggcttgagtactgcctcaaggatcggatgaacttcgacatccccgaggagattaagcagctgcagcagttccagaaggaggacgccgccctgaccatctacgagatgctgcagaacatcttcgccatcttcagacaggacagctccagcaccggctggaatgagactatcgtggagaatctgctggccaacgtgtaccatcagatcaaccacctgaagacagtgctggaggagaagctggagaaggaagacttcaccaggggcaaactgatgagctctctgcacctgaagagatattacggcaggatcctgcactacctgaaggccaaggagtacagtcactgtgcctggaccattgtgagagtggagatcctgaggaacttctacttcatcaacagactgaccggctacctgaggaactgaaaccggtatgttgctcggcaacggcctggtctgtgccaagtgtttgctgacgcaacccccactggctggggcttggccataggccatcagcgcatgcgtggaacctttgtggctcctctgccgatccatactgcggaactcctagccgcttgttttgctcgcagccggtctggggcaaagctcatcggaactgacaattctgtcgtcctctcgcggaaatatacatcgtttccatggctgctaggttgtactgccaactgcatccttcgcgggacgtcctttgtttacgtcccgtcggcgctgaatcccgcggacgacccctctcggggccgcttgggactctctcgtccccttctccgtctgccgttccagccgaccacggggcgcacctctctttacgcggtctccccgtctgtgccttctcatctgccggtccgtgtgcacttcgcttcacctctgcacgttgcatggagaccaccgtgaacgcccatcagatcctgcccaaggtcttacataagaggactcttggactcccagcaatgtcggcgcgccctggctagctggccagacatgataagatacattgatgagtttggacaaaccacaactagaatgcagtgaaaaaaatgctttatttgtgaaatttgtgatgctattgctttatttgtaaccattataagctgcaataaacaagttccctgacgggcttgtctgctcccggcatccgcttacagacaagctgtgaccgtctccgggagctgcatgtgtcagaggttttcaccgtcatcaccgaaacgcgcgagacgaaagggcctcgtgatacgcctatttttataggttaatgtcatgataataatggtttcttagacgtcaggtggcacttttcggggaaatgtgaagctttagaaaaactcatcgagcatcaaatgaaactgcaatttattcatatcaggattatcaataccatatttttgaaaaagccgtttctgtaatgaaggagaaaactcaccgaggcagttccataggatggcaagatcctggtatcggtctgcgattccgactcgtccaacatcaatacaacctattaatttcccctcgtcaaaaataaggttatcaagtgagaaatcaccatgagtgacgactgaatccggtgagaatggcaaaagtttatgcatttctttccagacttgttcaacaggccagccattacgctcgtcatcaaaatcactcgcatcaaccaaaccgttattcattcgtgattgcgcctgagcgagacgaaatacgcgatcgctgttaaaaggacaattacaaacaggaatcgaatgcaaccggcgcaggaacactgccagcgcatcaacaatattttcacctgaatcaggatattcttctaatacctggaatgctgtttttccggggatcgcagtggtgagtaaccatgcatcatcaggagtacggataaaatgcttgatggtcggaagaggcataaattccgtcagccagtttagtctgaccatctcatctgtaacatcattggcaacgctacctttgccatgtttcagaaacaactctggcgcatcgggcttcccatacaagcgatagattgtcgcacctgattgcccgacattatcgcgagcccatttatacccatataaatcagcatccatgttggaatttaatcgcggcctcgacgtttcccgttgaatatggctcataacaccccttgtattactgtttatgtaagcagacagttttattgttcatgatgatatatttttatcttgtgcaatgtaacatcagagattttgagacacgggccagagctgcaagcttctgtcagaccaagtttactcatatatactttagattgatttaaaacttcatttttaatttaaaaggatctaggtgaagatcctttatggtgaaggatgcgccacaggatactggcgcgcatacacagcacatctctttgcaggaaaaaaacgctatgaaaaatgttggttttatcggctggcgcggaatggtcggctctgttctcatgcaacgcatggtagaggagcgcgatttcgacgctattcgccctgttttcttttctacctcccagtttggacaggcggcgcccaccttcggcgacacctccaccggcacgctacaggacgcttttgatctggatgcgctaaaagcgctcgatatcatcgtgacctgccagggcggcgattataccaacgaaatttatccaaagctgcgcgaaagcggatggcagggttactggattgatgcggcttctacgctgcgcatgaaagatgatgccattattattctcgacccggtcaaccaggacgtgattaccgacggcct

SEQ ID NO: 527 - DNA, 6380 bp, synthetic construct
  misc_feature 1..6380: note = Synthetic DNA construct
  regulatory 1704..2007: note = enhancer - CMV; regulatory_class = enhancer
  regulatory 2008..2211: note = promoter - CMV promoter; regulatory_class = promoter
  gene 2308..2868: note = hIFNa2 NM_000605.4
  regulatory 2872..3461: note = RBS - VCIP IRES ATUM; regulatory_class = ribosome_binding_site
  gene 3465..4022: note = huIFNb
  misc_feature 4036..4569: note = HPRE
  regulatory 4600..4721: note = polyA_signal - SV40 poly(A) signal; regulatory_class = polyA_signal_sequence
  source 1..6380: mol_type = other DNA
  misc_feature 2299..2304: note = Kozak sequence
  regulatory 2197..2203: note = TATA signal; regulatory_class = TATA_box
  rep_origin 822..1410
  5'UTR 2212..2298
gaacaatggcgtgaagacctttgtgggcggtaactgtaccgttagcctgatgttgatgtcgctgggcggtctctttgcccataatctcgttgactgggtatccgtcgcgacctatcaggccgcctccggcggcggcgcgcgccatatgcgcgagctgttaacccagatgggtcagttgtatggccatgtcgccgatgaactggcgacgccgtcttccgcaattcttgatattgaacgcaaagttacggcattgacccgcagcggcgagctgccggttgataactttggcgtaccgctggcgggaagcctgatcccctggatcgacaaacagctcgataacggccagagccgcgaagagtggaaaggccaggcggaaaccaacaagattctcaatactgcctctgtgattccggttgatggtttgtgtgtgcgcgtcggcgcgctgcgctgtcacagccaggcgttcaccatcaagctgaaaaaagaggtatccattccgacggtggaagaactgctggcggcacataatccgtgggcgaaagtggtgccgaacgatcgtgatatcactatgcgcgaattaaccccggcggcggtgaccggcacgttgactacgccggttggtcgtctgcgtaagctgaacatggggccagagttcttgtcggcgtttaccgtaggcgaccagttgttatggggcgccgccgagccgctgcgtcgaatgctgcgccagttggcgtagttgataatctcatgaccaaaatcccttaacgtgagttttcgttccactgagcgtcagaccccgtagaaaagatcaaaggatcttcttgagatcctttttttctgcgcgtaatctgctgcttgcaaacaaaaaaaccaccgctaccagcggtggtttgtttgccggatcaagagctaccaactctttttccgaaggtaactggcttcagcagagcgcagataccaaatactgtccttctagtgtagccgtagttaggccaccacttcaagaactctgtagcaccgcctacatacctcgctctgctaatcctgttaccagtggctgctgccagtggcgataagtcgtgtcttaccgggttggactcaagacgatagttaccggataaggcgcagcggtcgggctgaacggggggttcgtgcacacagcccagcttggagcgaacgacctacaccgaactgagatacctacagcgtgagctatgagaaagcgccacgcttcccgaagggagaaaggcggacaggtatccggtaagcggcagggtcggaacaggagagcgcacgagggagcttccagggggaaacgcctggtatctttatagtcctgtcgggtttcgccacctctgacttgagcgtcgatttttgtgatgctcgtcaggggggcggagcctatggaaaaacgccagcaacgcggcctttttacggttcctggccttttgctggccttttgctcacatgttctttcctgcgttatcccctgattctgtggataaccgtattaccgcctttgagtgagctgataccgctcgccgcagccgaacgaccgagcgcagcgagtcagtgagcgaggaagcggtagagcgcccaatacgcaaaccgcctctccccgcgcgttggccgattcattaatgcagctggcacgacaggtttcccgactggaaagcgggcagtgagcgcaacgcaagtcgacccgttacataacttacggtaaatggcccgcctggctgaccgcccaacgacccccgcccattgacgtcaataatgacgtatgttcccatagtaacgccaatagggactttccattgacgtcaatgggtggagtatttacggtaaactgcccacttggcagtacatcaagtgtatcatatgccaagtacgccccctattgacgtcaatgacggtaaatggcccgcctggcattatgcccagtacatgaccttatgggactttcctacttggcagtacatctacgtattagtcatcgctattaccatggtgatgcggttttggcagtacatcaatgggcgtggatagcggtttgactcacggggatttccaagtctccaccccattgacgtcaatgggagtttgttttggcaccaaaatcaacgggactttccaaaatgtcgtaacaactccgccccattgacgcaaatgggcggtaggcgtgtacggtgggaggtctatataagcagagctggtttagtgaaccgtcagatccgctagcgattacgccaagctcgtctagacggcggccaagcttggcaatccggtactgttggtaaagccaccatggccttgacctttgctttactggtggccctcctggtgctcagctgcaagtcaagctgctctgtgggctgtgatctgcctcaaacccacagcctgggtagcaggaggaccttgatgctcctggcacagatgaggagaatctctcttttctcctgcttgaaggacagacatgactttggatttccccaggaggagtttggcaaccagttccaaaaggctgaaaccatccctgtcctccatgagatgatccagcagatcttcaatctcttcagcacaaaggactcatctgctgcttgggatgagaccctcctagacaaattctacactgaactctaccagcagctgaatgacctggaagcctgtgtgatacagggggtgggggtgacagagactcccctgatgaaggaggactccattctggctgtgaggaaatacttccaaagaatcactctctatctgaaagagaagaaatacagcccttgtgcctgggaggttgtcagagcagaaatcatgagatctttttctttgtcaacaaacttgcaagaaagtttaagaagtaaggaatgatgatagtggcagtttatggcgggcgtcctgcccgccaccctccagaaaacaaacccaggcgatcacagcagcagccgccgcggcagcagcaccaacagcaggaggagcaggaggagccggaggaggaggaggaggaggaggcaaagttagagttggggctggcgctccggagttgctgggctcagcgcagctcccattcattaaggaaccagctgcggaggaaggtggccgagcgcccgcgctgcccactcgctcgctcgcgcactcagacgcgcgccacaacagcgcgccccaagctgcgcagctctgcaaaagtttctgctcgggatctggctctcttccccttggactttagaacgatttagggttgacagaggaaagcagaggcgcgcaggaggagcagaaaacaccaccttctgcagttggaggcaggcagccccggctgcactctagccgccgcgcccggagccggggccgacccgccactatccgcagcagcctcggccaggaggcgacccgggcgcctgggtgtgtggctgctgttgcgggacgtcttcgcggggcgggaggctcgcgccgcagccagcgccatgaccaacaagtgtctcctccaaattgctctcctgttgtgcttctccactacagctctttccatgagctacaacttgcttggattcctacaaagaagcagcaattttcagtgtcagaagctcctgtggcaattgaatgggaggcttgaatactgcctcaaggacaggatgaactttgacatccctgaggagattaagcagctgcagcagttccagaaggaggacgccgcattgaccatctatgagatgctccagaacatctttgctattttcagacaagattcatctagcactggctggaatgagactattgttgagaacctcctggctaatgtctatcatcagataaaccatctgaagacagtcctggaagaaaaactggagaaagaagatttcaccaggggaaaactcatgagcagtctgcacctgaaaagatattatgggaggattctgcattacctgaaggccaaggagtacagtcactgtgcctggaccatagtcagagtggaaatcctaaggaacttttacttcattaacagacttacaggttacctccgaaactgaaaccggtatgttgctcggcaacggcctggtctgtgccaagtgtttgctgacgcaacccccactggctggggcttggccataggccatcagcgcatgcgtggaacctttgtggctcctctgccgatccatactgcggaactcctagccgcttgttttgctcgcagccggtctggggcaaagctcatcggaactgacaattctgtcgtcctctcgcggaaatatacatcgtttccatggctgctaggttgtactgccaactgcatccttcgcgggacgtcctttgtttacgtcccgtcggcgctgaatcccgcggacgacccctctcggggccgcttgggactctctcgtccccttctccgtctgccgttccagccgaccacggggcgcacctctctttacgcggtctccccgtctgtgccttctcatctgccggtccgtgtgcacttcgcttcacctctgcacgttgcatggagaccaccgtgaacgcccatcagatcctgcccaaggtcttacataagaggactcttggactcccagcaatgtcggcgcgccctggctagctggccagacatgataagatacattgatgagtttggacaaaccacaactagaatgcagtgaaaaaaatgctttatttgtgaaatttgtgatgctattgctttatttgtaaccattataagctgcaataaacaagttccctgacgggcttgtctgctcccggcatccgcttacagacaagctgtgaccgtctccgggagctgcatgtgtcagaggttttcaccgtcatcaccgaaacgcgcgagacgaaagggcctcgtgatacgcctatttttataggttaatgtcatgataataatggtttcttagacgtcaggtggcacttttcggggaaatgtgaagctttagaaaaactcatcgagcatcaaatgaaactgcaatttattcatatcaggattatcaataccatatttttgaaaaagccgtttctgtaatgaaggagaaaactcaccgaggcagttccataggatggcaagatcctggtatcggtctgcgattccgactcgtccaacatcaatacaacctattaatttcccctcgtcaaaaataaggttatcaagtgagaaatcaccatgagtgacgactgaatccggtgagaatggcaaaagtttatgcatttctttccagacttgttcaacaggccagccattacgctcgtcatcaaaatcactcgcatcaaccaaaccgttattcattcgtgattgcgcctgagcgagacgaaatacgcgatcgctgttaaaaggacaattacaaacaggaatcgaatgcaaccggcgcaggaacactgccagcgcatcaacaatattttcacctgaatcaggatattcttctaatacctggaatgctgtttttccggggatcgcagtggtgagtaaccatgcatcatcaggagtacggataaaatgcttgatggtcggaagaggcataaattccgtcagccagtttagtctgaccatctcatctgtaacatcattggcaacgctacctttgccatgtttcagaaacaactctggcgcatcgggcttcccatacaagcgatagattgtcgcacctgattgcccgacattatcgcgagcccatttatacccatataaatcagcatccatgttggaatttaatcgcggcctcgacgtttcccgttgaatatggctcataacaccccttgtattactgtttatgtaagcagacagttttattgttcatgatgatatatttttatcttgtgcaatgtaacatcagagattttgagacacgggccagagctgcaagcttctgtcagaccaagtttactcatatatactttagattgatttaaaacttcatttttaatttaaaaggatctaggtgaagatcctttatggtgaaggatgcgccacaggatactggcgcgcatacacagcacatctctttgcaggaaaaaaacgctatgaaaaatgttggttttatcggctggcgcggaatggtcggctctgttctcatgcaacgcatggtagaggagcgcgatttcgacgctattcgccctgttttcttttctacctcccagtttggacaggcggcgcccaccttcggcgacacctccaccggcacgctacaggacgcttttgatctggatgcgctaaaagcgctcgatatcatcgtgacctgccagggcggcgattataccaacgaaatttatccaaagctgcgcgaaagcggatggcagggttactggattgatgcggcttctacgctgcgcatgaaagatgatgccattattattctcgacccggtcaaccaggacgtgattaccgacggcct

SEQ ID NO: 528 - DNA, 7353 bp, synthetic construct
  misc_feature 1..7353: note = Synthetic DNA construct
  regulatory 1704..2007: note = enhancer - CMV; regulatory_class = enhancer
  regulatory 2008..2211: note = promoter - CMV promoter; regulatory_class = promoter
  gene 2308..2865: note = huIFNb opt 41
  misc_feature 2878..3411: note = HPRE
  regulatory 3420..3644: note = polyA_signal - bGH poly(A) signal; regulatory_class = polyA_signal_sequence
  regulatory 3675..3886: note = promoter - EF-1-alpha core promoter; regulatory_class = promoter
  gene 4210..4770: note = hIFNa2 NM_000605.4 opt 41
  misc_feature 4823..5411: note = WPRE
  regulatory 5434..5555: note = polyA_signal - SV40 poly(A) signal; regulatory_class = polyA_signal_sequence
  source 1..7353: mol_type = other DNA
  regulatory 2197..2203: note = TATA signal; regulatory_class = TATA_box
  misc_feature 2299..2304: note = Kozak sequence
  misc_feature 4201..4206: note = Kozak sequence
  rep_origin 822..1410
  5'UTR 2212..2298
  regulatory 3824..3830: note = TATA signal; regulatory_class = TATA_box
  misc_feature 3899..4167: note = LTR
gaacaatggcgtgaagacctttgtgggcggtaactgtaccgttagcctgatgttgatgtcgctgggcggtctctttgcccataatctcgttgactgggtatccgtcgcgacctatcaggccgcctccggcggcggcgcgcgccatatgcgcgagctgttaacccagatgggtcagttgtatggccatgtcgccgatgaactggcgacgccgtcttccgcaattcttgatattgaacgcaaagttacggcattgacccgcagcggcgagctgccggttgataactttggcgtaccgctggcgggaagcctgatcccctggatcgacaaacagctcgataacggccagagccgcgaagagtggaaaggccaggcggaaaccaacaagattctcaatactgcctctgtgattccggttgatggtttgtgtgtgcgcgtcggcgcgctgcgctgtcacagccaggcgttcaccatcaagctgaaaaaagaggtatccattccgacggtggaagaactgctggcggcacataatccgtgggcgaaagtggtgccgaacgatcgtgatatcactatgcgcgaattaaccccggcggcggtgaccggcacgttgactacgccggttggtcgtctgcgtaagctgaacatggggccagagttcttgtcggcgtttaccgtaggcgaccagttgttatggggcgccgccgagccgctgcgtcgaatgctgcgccagttggcgtagttgataatctcatgaccaaaatcccttaacgtgagttttcgttccactgagcgtcagaccccgtagaaaagatcaaaggatcttcttgagatcctttttttctgcgcgtaatctgctgcttgcaaacaaaaaaaccaccgctaccagcggtggtttgtttgccggatcaagagctaccaactctttttccgaaggtaactggcttcagcagagcgcagataccaaatactgtccttctagtgtagccgtagttaggccaccacttcaagaactctgtagcaccgcctacatacctcgctctgctaatcctgttaccagtggctgctgccagtggcgataagtcgtgtcttaccgggttggactcaagacgatagttaccggataaggcgcagcggtcgggctgaacggggggttcgtgcacacagcccagcttggagcgaacgacctacaccgaactgagatacctacagcgtgagctatgagaaagcgccacgcttcccgaagggagaaaggcggacaggtatccggtaagcggcagggtcggaacaggagagcgcacgagggagcttccagggggaaacgcctggtatctttatagtcctgtcgggtttcgccacctctgacttgagcgtcgatttttgtgatgctcgtcaggggggcggagcctatggaaaaacgccagcaacgcggcctttttacggttcctggccttttgctggccttttgctcacatgttctttcctgcgttatcccctgattctgtggataaccgtattaccgcctttgagtgagctgataccgctcgccgcagccgaacgaccgagcgcagcgagtcagtgagcgaggaagcggtagagcgcccaatacgcaaaccgcctctccccgcgcgttggccgattcattaatgcagctggcacgacaggtttcccgactggaaagcgggcagtgagcgcaacgcaagtcgacccgttacataacttacggtaaatggcccgcctggctgaccgcccaacgacccccgcccattgacgtcaataatgacgtatgttcccatagtaacgccaatagggactttccattgacgtcaatgggtggagtatttacggtaaactgcccacttggcagtacatcaagtgtatcatatgccaagtacgccccctattgacgtcaatgacggtaaatggcccgcctggcattatgcccagtacatgaccttatgggactttcctacttggcagtacatctacgtattagtcatcgctattaccatggtgatgcggttttggcagtacatcaatgggcgtggatagcggtttgactcacggggatttccaagtctccaccccattgacgtcaatgggagtttgttttggcaccaaaatcaacgggactttccaaaatgtcgtaacaactccgccccattgacgcaaatgggcggtaggcgtgtacggtgggaggtctatataagcagagctggtttagtgaaccgtcagatccgctagcgattacgccaagctcgtctagacggcggccaagcttggcaatccggtactgttggtaaagccaccatgacaaacaagtgccttctccaaatcgccctgctgctgtgcttctccactaccgctctctccatgagctacaacctgcttggattcctgcaaagaagcagcaatttccagtgccagaagctgctgtggcagttgaatgggaggcttgagtactgcctgaaggacaggatgaacttcgacatccccgaggagatcaagcagctgcagcagttccagaaggaggacgccgccctgaccatctacgagatgctgcagaacatcttcgctatcttcagacaagattcctcaagcaccggctggaacgagaccattgttgagaacctgctggccaacgtctaccaccagatcaaccatctgaagaccgtgctggaggagaagctggagaaggaagacttcaccaggggcaaactgatgagctctctgcacctgaaaagatactacggcaggatcctgcactacctgaaggccaaggagtacagtcactgtgcctggaccattgtgagagtggagatcctgaggaacttctacttcatcaacagactgaccggctacctgaggaactgaaccggtatgttgctcggcaacggcctggtctgtgccaagtgtttgctgacgcaacccccactggctggggcttggccataggccatcagcgcatgcgtggaacctttgtggctcctctgccgatccatactgcggaactcctagccgcttgttttgctcgcagccggtctggggcaaagctcatcggaactgacaattctgtcgtcctctcgcggaaatatacatcgtttccatggctgctaggttgtactgccaactgcatccttcgcgggacgtcctttgtttacgtcccgtcggcgctgaatcccgcggacgacccctctcggggccgcttgggactctctcgtccccttctccgtctgccgttccagccgaccacggggcgcacctctctttacgcggtctccccgtctgtgccttctcatctgccggtccgtgtgcacttcgcttcacctctgcacgttgcatggagaccaccgtgaacgcccatcagatcctgcccaaggtcttacataagaggactcttggactcccagcaatgtcggcgcgccctgtgccttctagttgccagccatctgttgtttgcccctcccccgtgccttccttgaccctggaaggtgccactcccactgtcctttcctaataaaatgaggaaattgcatcgcattgtctgagtaggtgtcattctattctggggggtggggtggggcaggacagcaagggggaggattgggaagacaatagcaggcatgctggggatgcggtgggctctatggggatccgctccgggaattctgcccgtcagtgggcagagcgcacatcgcccacagtccccgagaagttggggggaggggtcggcaattgaacgggtgcctagagaaggtggcgcggggtaaactgggaaagtgatgtcgtgtactggctccgcctttttcccgagggtgggggagaaccgtatataagtgcagtagtcgccgtgaacgttctttttcgcaacgggtttgccgccagaacacagctgaagcttcgaggggctcgcatctctccttcacgcgcccgccgccctacctgaggccgccatccacgccggttgagtcgcgttctgccgcctcccgcctgtggtgcctcctgaactgcgtccgccgtctaggtaagtttaaagctcaggtcgagaccgggcctttgtccggcgctcccttggagcctacctagactcagccggctctccacgctttgcctgaccctgcttgctcaactctacgtctttgtttcgttttctgttctgcgccgttacagatccaagctgtgaccggcgcctacctgagatcaccggccaccatggccctgaccttcgcccttctggtggccctgctggtgctgagctgcaagtctagctgctctgtgggctgtgacctgccccaaacccacagcctgggaagcaggaggaccttgatgctgctggcccagatgaggagaatcagcctgttcagctgcctgaaggacagacacgactttggatttccccaggaggagtttggcaaccagttccaaaaggctgagaccatccccgtgctgcatgagatgatccagcagatcttcaacctgttttccaccaaggactccagcgcagcctgggatgagaccctgctggataaattctacaccgaactgtaccagcagctgaacgacctggaggcctgcgtgattcagggcgtgggcgtgacagagacacccctgatgaaggaggacagcatcctggccgtgaggaagtacttccagagaatcaccctgtacctgaaggagaagaagtacagcccctgcgcctgggaggttgtgagagccgagatcatgagaagcttcagcctgagcaccaacctgcaggagagcctgagaagcaaggagtgaggccgcgactcgcggccgcctatgtacctcctgcttacaacacgctagcaatcaacctctggattacaaaatttgtgaaagattgactggtattcttaactatgttgctccttttacgctatgtggatacgctgctttaatgcctttgtatcatgctattgcttcccgtatggctttcattttctcctccttgtataaatcctggttgctgtctctttatgaggagttgtggcccgttgtcaggcaacgtggcgtggtgtgcactgtgtttgctgacgcaacccccactggttggggcattgccaccacctgtcagctcctttccgggactttcgctttccccctccctattgccacggcggaactcatcgccgcctgccttgcccgctgctggacaggggctcggctgttgggcactgacaattccgtggtgttgtcggggaagctgacgtcctttccatggctgctcgcctgtgttgccacctggattctgcgcgggacgtccttctgctacgtcccttcggccctcaatccagcggaccttccttcccgcggcctgctgccggctctgcggcctcttccgcgtcttcgccttcgccctcagacgagtcggatctccctttgggccgcctccccgcctggctagctggccagacatgataagatacattgatgagtttggacaaaccacaactagaatgcagtgaaaaaaatgctttatttgtgaaatttgtgatgctattgctttatttgtaaccattataagctgcaataaacaagttaacaacaacaattgcattcattttatgtttcaggttcagggggaggtgtgggaggttttttaaagcaagtaaaacctctacaaatgtggtatggctcgagttaagccagccccgacacccgccaacacccgctgacgcgccctgacgggcttgtctgctcccggcatccgcttacagacaagctgtgaccgtctccgggagctgcatgtgtcagaggttttcaccgtcatcaccgaaacgcgcgagacgaaagggcctcgtgatacgcctatttttataggttaatgtcatgataataatggtttcttagacgtcaggtggcacttttcggggaaatgtgaagctttagaaaaactcatcgagcatcaaatgaaactgcaatttattcatatcaggattatcaataccatatttttgaaaaagccgtttctgtaatgaaggagaaaactcaccgaggcagttccataggatggcaagatcctggtatcggtctgcgattccgactcgtccaacatcaatacaacctattaatttcccctcgtcaaaaataaggttatcaagtgagaaatcaccatgagtgacgactgaatccggtgagaatggcaaaagtttatgcatttctttccagacttgttcaacaggccagccattacgctcgtcatcaaaatcactcgcatcaaccaaaccgttattcattcgtgattgcgcctgagcgagacgaaatacgcgatcgctgttaaaaggacaattacaaacaggaatcgaatgcaaccggcgcaggaacactgccagcgcatcaacaatattttcacctgaatcaggatattcttctaatacctggaatgctgtttttccggggatcgcagtggtgagtaaccatgcatcatcaggagtacggataaaatgcttgatggtcggaagaggcataaattccgtcagccagtttagtctgaccatctcatctgtaacatcattggcaacgctacctttgccatgtttcagaaacaactctggcgcatcgggcttcccatacaagcgatagattgtcgcacctgattgcccgacattatcgcgagcccatttatacccatataaatcagcatccatgttggaatttaatcgcggcctcgacgtttcccgttgaatatggctcataacaccccttgtattactgtttatgtaagcagacagttttattgttcatgatgatatatttttatcttgtgcaatgtaacatcagagattttgagacacgggccagagctgcaagcttctgtcagaccaagtttactcatatatactttagattgatttaaaacttcatttttaatttaaaaggatctaggtgaagatcctttatggtgaaggatgcgccacaggatactggcgcgcatacacagcacatctctttgcaggaaaaaaacgctatgaaaaatgttggttttatcggctggcgcggaatggtcggctctgttctcatgcaacgcatggtagaggagcgcgatttcgacgctattcgccctgttttcttttctacctcccagtttggacaggcggcgcccaccttcggcgacacctccaccggcacgctacaggacgcttttgatctggatgcgctaaaagcgctcgatatcatcgtgacctgccagggcggcgattataccaacgaaatttatccaaagctgcgcgaaagcggatggcagggttactggattgatgcggcttctacgctgcgcatgaaagatgatgccattattattctcgacccggtcaaccaggacgtgattaccgacggcct

SEQ ID NO: 529 - DNA, 7353 bp, synthetic construct
  misc_feature 1..7353: note = Synthetic DNA construct
  regulatory 1704..2007: note = enhancer - CMV; regulatory_class = enhancer
  regulatory 2008..2211: note = promoter - CMV promoter; regulatory_class = promoter
  gene 2308..2865: note = huIFNb
  misc_feature 2878..3411: note = HPRE
  regulatory 3420..3644: note = polyA_signal - bGH poly(A) signal; regulatory_class = polyA_signal_sequence
  regulatory 3675..3886: note = promoter - EF-1-alpha core promoter; regulatory_class = promoter
  gene 4210..4770: note = hIFNa2 NM_000605.4
  misc_feature 4823..5411: note = WPRE
  regulatory 5434..5555: note = polyA_signal - SV40 poly(A) signal; regulatory_class = polyA_signal_sequence
  source 1..7353: mol_type = other DNA
  rep_origin 822..1410
  regulatory 2197..2203: note = TATA signal; regulatory_class = TATA_box
  regulatory 3824..3830: note = TATA signal; regulatory_class = TATA_box
  misc_feature 2299..2304: note = Kozak sequence
  misc_feature 4201..4206: note = Kozak sequence
  5'UTR 2212..2298
  misc_feature 3899..4167
gaacaatggcgtgaagacctttgtgggcggtaactgtaccgttagcctgatgttgatgtcgctgggcggtctctttgcccataatctcgttgactgggtatccgtcgcgacctatcaggccgcctccggcggcggcgcgcgccatatgcgcgagctgttaacccagatgggtcagttgtatggccatgtcgccgatgaactggcgacgccgtcttccgcaattcttgatattgaacgcaaagttacggcattgacccgcagcggcgagctgccggttgataactttggcgtaccgctggcgggaagcctgatcccctggatcgacaaacagctcgataacggccagagccgcgaagagtggaaaggccaggcggaaaccaacaagattctcaatactgcctctgtgattccggttgatggtttgtgtgtgcgcgtcggcgcgctgcgctgtcacagccaggcgttcaccatcaagctgaaaaaagaggtatccattccgacggtggaagaactgctggcggcacataatccgtgggcgaaagtggtgccgaacgatcgtgatatcactatgcgcgaattaaccccggcggcggtgaccggcacgttgactacgccggttggtcgtctgcgtaagctgaacatggggccagagttcttgtcggcgtttaccgtaggcgaccagttgttatggggcgccgccgagccgctgcgtcgaatgctgcgccagttggcgtagttgataatctcatgaccaaaatcccttaacgtgagttttcgttccactgagcgtcagaccccgtagaaaagatcaaaggatcttcttgagatcctttttttctgcgcgtaatctgctgcttgcaaacaaaaaaaccaccgctaccagcggtggtttgtttgccggatcaagagctaccaactctttttccgaaggtaactggcttcagcagagcgcagataccaaatactgtccttctagtgtagccgtagttaggccaccacttcaagaactctgtagcaccgcctacatacctcgctctgctaatcctgttaccagtggctgctgccagtggcgataagtcgtgtcttaccgggttggactcaagacgatagttaccggataaggcgcagcggtcgggctgaacggggggttcgtgcacacagcccagcttggagcgaacgacctacaccgaactgagatacctacagcgtgagctatgagaaagcgccacgcttcccgaagggagaaaggcggacaggtatccggtaagcggcagggtcggaacaggagagcgcacgagggagcttccagggggaaacgcctggtatctttatagtcctgtcgggtttcgccacctctgacttgagcgtcgatttttgtgatgctcgtcaggggggcggagcctatggaaaaacgccagcaacgcggcctttttacggttcctggccttttgctggccttttgctcacatgttctttcctgcgttatcccctgattctgtggataaccgtattaccgcctttgagtgagctgataccgctcgccgcagccgaacgaccgagcgcagcgagtcagtgagcgaggaagcggtagagcgcccaatacgcaaaccgcctctccccgcgcgttggccgattcattaatgcagctggcacgacaggtttcccgactggaaagcgggcagtgagcgcaacgcaagtcgacccgttacataacttacggtaaatggcccgcctggctgaccgcccaacgacccccgcccattgacgtcaataatgacgtatgttcccatagtaacgccaatagggactttccattgacgtcaatgggtggagtatttacggtaaactgcccacttggcagtacatcaagtgtatcatatgccaagtacgccccctattgacgtcaatgacggtaaatggcccgcctggcattatgcccagtacatgaccttatgggactttcctacttggcagtacatctacgtattagtcatcgctattaccatggtgatgcggttttggcagtacatcaatgggcgtggatagcggtttgactcacggggatttccaagtctccaccccattgacgtcaatgggagtttgttttggcaccaaaatcaacgggactttccaaaatgtcgtaacaactccgccccattgacgcaaatgggcggtaggcgtgtacggtgggaggtctatataagcagagctggtttagtgaaccgtcagatccgctagcgattacgccaagctcgtctagacggcggccaagcttggcaatccggtactgttggtaaagccaccatgaccaacaagtgtctcctccaaattgctctcctgttgtgcttctccactacagctctttccatgagctacaacttgcttggattcctacaaagaagcagcaattttcagtgtcagaagctcctgtggcaattgaatgggaggcttgaatactgcctcaaggacaggatgaactttgacatccctgaggagattaagcagctgcagcagttccagaaggaggacgccgcattgaccatctatgagatgctccagaacatctttgctattttcagacaagattcatctagcactggctggaatgagactattgttgagaacctcctggctaatgtctatcatcagataaaccatctgaagacagtcctggaagaaaaactggagaaagaagatttcaccaggggaaaactcatgagcagtctgcacctgaaaagatattatgggaggattctgcattacctgaaggccaaggagtacagtcactgtgcctggaccatagtcagagtggaaatcctaaggaacttttacttcattaacagacttacaggttacctccgaaactgaaccggtatgttgctcggcaacggcctggtctgtgccaagtgtttgctgacgcaacccccactggctggggcttggccataggccatcagcgcatgcgtggaacctttgtggctcctctgccgatccatactgcggaactcctagccgcttgttttgctcgcagccggtctggggcaaagctcatcggaactgacaattctgtcgtcctctcgcggaaatatacatcgtttccatggctgctaggttgtactgccaactgcatccttcgcgggacgtcctttgtttacgtcccgtcggcgctgaatcccgcggacgacccctctcggggccgcttgggactctctcgtccccttctccgtctgccgttccagccgaccacggggcgcacctctctttacgcggtctccccgtctgtgccttctcatctgccggtccgtgtgcacttcgcttcacctctgcacgttgcatggagaccaccgtgaacgcccatcagatcctgcccaaggtcttacataagaggactcttggactcccagcaatgtcggcgcgccctgtgccttctagttgccagccatctgttgtttgcccctcccccgtgccttccttgaccctggaaggtgccactcccactgtcctttcctaataaaatgaggaaattgcatcgcattgtctgagtaggtgtcattctattctggggggtggggtggggcaggacagcaagggggaggattgggaagacaatagcaggcatgctggggatgcggtgggctctatggggatccgctccgggaattctgcccgtcagtgggcagagcgcacatcgcccacagtccccgagaagttggggggaggggtcggcaattgaacgggtgcctagagaaggtggcgcggggtaaactgggaaagtgatgtcgtgtactggctccgcctttttcccgagggtgggggagaaccgtatataagtgcagtagtcgccgtgaacgttctttttcgcaacgggtttgccgccagaacacagctgaagcttcgaggggctcgcatctctccttcacgcgcccgccgccctacctgaggccgccatccacgccggttgagtcgcgttctgccgcctcccgcctgtggtgcctcctgaactgcgtccgccgtctaggtaagtttaaagctcaggtcgagaccgggcctttgtccggcgctcccttggagcctacctagactcagccggctctccacgctttgcctgaccctgcttgctcaactctacgtctttgtttcgttttctgttctgcgccgttacagatccaagctgtgaccggcgcctacctgagatcaccggccaccatggccttgacctttgctttactggtggccctcctggtgctcagctgcaagtcaagctgctctgtgggctgtgatctgcctcaaacccacagcctgggtagcaggaggaccttgatgctcctggcacagatgaggagaatctctcttttctcctgcttgaaggacagacatgactttggatttccccaggaggagtttggcaaccagttccaaaaggctgaaaccatccctgtcctccatgagatgatccagcagatcttcaatctcttcagcacaaaggactcatctgctgcttgggatgagaccctcctagacaaattctacactgaactctaccagcagctgaatgacctggaagcctgtgtgatacagggggtgggggtgacagagactcccctgatgaaggaggactccattctggctgtgaggaaatacttccaaagaatcactctctatctgaaagagaagaaatacagcccttgtgcctgggaggttgtcagagcagaaatcatgagatctttttctttgtcaacaaacttgcaagaaagtttaagaagtaaggaatgaggccgcgactcgcggccgcctatgtacctcctgcttacaacacgctagcaatcaacctctggattacaaaatttgtgaaagattgactggtattcttaactatgttgctccttttacgctatgtggatacgctgctttaatgcctttgtatcatgctattgcttcccgtatggctttcattttctcctccttgtataaatcctggttgctgtctctttatgaggagttgtggcccgttgtcaggcaacgtggcgtggtgtgcactgtgtttgctgacgcaacccccactggttggggcattgccaccacctgtcagctcctttccgggactttcgctttccccctccctattgccacggcggaactcatcgccgcctgccttgcccgctgctggacaggggctcggctgttgggcactgacaattccgtggtgttgtcggggaagctgacgtcctttccatggctgctcgcctgtgttgccacctggattctgcgcgggacgtccttctgctacgtcccttcggccctcaatccagcggaccttccttcccgcggcctgctgccggctctgcggcctcttccgcgtcttcgccttcgccctcagacgagtcggatctccctttgggccgcctccccgcctggctagctggccagacatgataagatacattgatgagtttggacaaaccacaactagaatgcagtgaaaaaaatgctttatttgtgaaatttgtgatgctattgctttatttgtaaccattataagctgcaataaacaagttaacaacaacaattgcattcattttatgtttcaggttcagggggaggtgtgggaggttttttaaagcaagtaaaacctctacaaatgtggtatggctcgagttaagccagccccgacacccgccaacacccgctgacgcgccctgacgggcttgtctgctcccggcatccgcttacagacaagctgtgaccgtctccgggagctgcatgtgtcagaggttttcaccgtcatcaccgaaacgcgcgagacgaaagggcctcgtgatacgcctatttttataggttaatgtcatgataataatggtttcttagacgtcaggtggcacttttcggggaaatgtgaagctttagaaaaactcatcgagcatcaaatgaaactgcaatttattcatatcaggattatcaataccatatttttgaaaaagccgtttctgtaatgaaggagaaaactcaccgaggcagttccataggatggcaagatcctggtatcggtctgcgattccgactcgtccaacatcaatacaacctattaatttcccctcgtcaaaaataaggttatcaagtgagaaatcaccatgagtgacgactgaatccggtgagaatggcaaaagtttatgcatttctttccagacttgttcaacaggccagccattacgctcgtcatcaaaatcactcgcatcaaccaaaccgttattcattcgtgattgcgcctgagcgagacgaaatacgcgatcgctgttaaaaggacaattacaaacaggaatcgaatgcaaccggcgcaggaacactgccagcgcatcaacaatattttcacctgaatcaggatattcttctaatacctggaatgctgtttttccggggatcgcagtggtgagtaaccatgcatcatcaggagtacggataaaatgcttgatggtcggaagaggcataaattccgtcagccagtttagtctgaccatctcatctgtaacatcattggcaacgctacctttgccatgtttcagaaacaactctggcgcatcgggcttcccatacaagcgatagattgtcgcacctgattgcccgacattatcgcgagcccatttatacccatataaatcagcatccatgttggaatttaatcgcggcctcgacgtttcccgttgaatatggctcataacaccccttgtattactgtttatgtaagcagacagttttattgttcatgatgatatatttttatcttgtgcaatgtaacatcagagattttgagacacgggccagagctgcaagcttctgtcagaccaagtttactcatatatactttagattgatttaaaacttcatttttaatttaaaaggatctaggtgaagatcctttatggtgaaggatgcgccacaggatactggcgcgcatacacagcacatctctttgcaggaaaaaaacgctatgaaaaatgttggttttatcggctggcgcggaatggtcggctctgttctcatgcaacgcatggtagaggagcgcgatttcgacgctattcgccctgttttcttttctacctcccagtttggacaggcggcgcccaccttcggcgacacctccaccggcacgctacaggacgcttttgatctggatgcgctaaaagcgctcgatatcatcgtgacctgccagggcggcgattataccaacgaaatttatccaaagctgcgcgaaagcggatggcagggttactggattgatgcggcttctacgctgcgcatgaaagatgatgccattattattctcgacccggtcaaccaggacgtgattaccgacggcct

SEQ ID NO: 530 - DNA, 5986 bp, synthetic construct
  misc_feature 1..5986: note = Synthetic DNA construct
  regulatory 1704..2007: note = enhancer - CMV; regulatory_class = enhancer
  regulatory 2008..2211: note = promoter - CMV promoter; regulatory_class = promoter
  gene 2308..2865: note = huIFNb opt 29
  misc_feature 2866..2874: note = GSG linker opt 29
  gene 2875..2928: note = T2A opt 29
  gene 2929..3489: note = hIFNa2 NM_000605.4 opt 29
  misc_feature 3503..4036: note = HPRE
  regulatory 4045..4269: note = polyA_signal - bGH poly(A) signal; regulatory_class = polyA_signal_sequence
  misc_feature 4248..4327: note = Duplexed DNA insert
  source 1..5986: mol_type = other DNA
  rep_origin 822..1410
  regulatory 2197..2203: note = TATA signal; regulatory_class = TATA_box
  misc_feature 2299..2304: note = Kozak sequence
  5'UTR 2212..2298
gaacaatggcgtgaagacctttgtgggcggtaactgtaccgttagcctgatgttgatgtcgctgggcggtctctttgcccataatctcgttgactgggtatccgtcgcgacctatcaggccgcctccggcggcggcgcgcgccatatgcgcgagctgttaacccagatgggtcagttgtatggccatgtcgccgatgaactggcgacgccgtcttccgcaattcttgatattgaacgcaaagttacggcattgacccgcagcggcgagctgccggttgataactttggcgtaccgctggcgggaagcctgatcccctggatcgacaaacagctcgataacggccagagccgcgaagagtggaaaggccaggcggaaaccaacaagattctcaatactgcctctgtgattccggttgatggtttgtgtgtgcgcgtcggcgcgctgcgctgtcacagccaggcgttcaccatcaagctgaaaaaagaggtatccattccgacggtggaagaactgctggcggcacataatccgtgggcgaaagtggtgccgaacgatcgtgatatcactatgcgcgaattaaccccggcggcggtgaccggcacgttgactacgccggttggtcgtctgcgtaagctgaacatggggccagagttcttgtcggcgtttaccgtaggcgaccagttgttatggggcgccgccgagccgctgcgtcgaatgctgcgccagttggcgtagttgataatctcatgaccaaaatcccttaacgtgagttttcgttccactgagcgtcagaccccgtagaaaagatcaaaggatcttcttgagatcctttttttctgcgcgtaatctgctgcttgcaaacaaaaaaaccaccgctaccagcggtggtttgtttgccggatcaagagctaccaactctttttccgaaggtaactggcttcagcagagcgcagataccaaatactgtccttctagtgtagccgtagttaggccaccacttcaagaactctgtagcaccgcctacatacctcgctctgctaatcctgttaccagtggctgctgccagtggcgataagtcgtgtcttaccgggttggactcaagacgatagttaccggataaggcgcagcggtcgggctgaacggggggttcgtgcacacagcccagcttggagcgaacgacctacaccgaactgagatacctacagcgtgagctatgagaaagcgccacgcttcccgaagggagaaaggcggacaggtatccggtaagcggcagggtcggaacaggagagcgcacgagggagcttccagggggaaacgcctggtatctttatagtcctgtcgggtttcgccacctctgacttgagcgtcgatttttgtgatgctcgtcaggggggcggagcctatggaaaaacgccagcaacgcggcctttttacggttcctggccttttgctggccttttgctcacatgttctttcctgcgttatcccctgattctgtggataaccgtattaccgcctttgagtgagctgataccgctcgccgcagccgaacgaccgagcgcagcgagtcagtgagcgaggaagcggtagagcgcccaatacgcaaaccgcctctccccgcgcgttggccgattcattaatgcagctggcacgacaggtttcccgactggaaagcgggcagtgagcgcaacgcaagtcgacccgttacataacttacggtaaatggcccgcctggctgaccgcccaacgacccccgcccattgacgtcaataatgacgtatgttcccatagtaacgccaatagggactttccattgacgtcaatgggtggagtatttacggtaaactgcccacttggcagtacatcaagtgtatcatatgccaagtacgccccctattgacgtcaatgacggtaaatggcccgcctggcattatgcccagtacatgaccttatgggactttcctacttggcagtacatctacgtattagtcatcgctattaccatggtgatgcggttttggcagtacatcaatgggcgtggatagcggtttgactcacggggatttccaagtctccaccccattgacgtcaatgggagtttgttttggcaccaaaatcaacgggactttccaaaatgtcgtaacaactccgccccattgacgcaaatgggcggtaggcgtgtacggtgggaggtctatataagcagagctggtttagtgaaccgtcagatccgctagcgattacgccaagctcgtctagacggcggccaagcttggcaatccggtactgttggtaaagccaccatgactaacaagtgcctgctgcagattgccctgctgctgtgcttcagcaccaccgccctctccatgagctacaacctgcttggattcctacagagaagcagcaattttcagtgtcagaagctgctgtggcagctgaacggcaggctggaatactgcctgaaggaccggatgaacttcgacattcctgaggagatcaagcagctgcagcagttccagaaggaggacgccgccctgaccatctacgagatgctgcagaacatctttgccatcttcagacaggactcttcttccaccggctggaacgagaccattgttgagaacctgctggccaacgtgtaccaccagatcaaccatctgaagaccgtgctggaggagaagctggagaaggaggacttcaccaggggaaaactgatgagctctctgcacctgaaaagatactacggcaggatcctgcactacctgaaggccaaggagtacagtcactgtgcctggaccatagtgagagtggagatcctgaggaacttctacttcatcaacagactgaccggctacctgaggaacggctctggcgagggtagaggctcgttactgacatgcggcgatgtcgaggagaacccgggacctgccttgacctttgctttgctggtggccctcctggtgctcagctgcaagtcaagctgctctgtgggctgtgacctgcctcaaacccacagcctgggtagcaggaggaccctcatgctcctggctcagatgaggagaatctccctcttcagctgcctgaaggacagacacgacttcggatttccccaggaggagtttggcaaccagttccaaaaggctgagaccatccccgtgctgcatgagatgatccagcagatcttcaacctgttcagcactaaagactcaagcgccgcctgggacgagaccctgctggataagttctacaccgagctgtaccagcagctgaacgacctggaggcctgcgtgattcagggcgtgggcgtgacagagacacccctgatgaaggaggacagcatcctggccgtgaggaagtacttccagagaatcaccctgtacctgaaggagaagaagtacagcccctgcgcctgggaggttgtgagagccgagatcatgaggagcttctctctgagcaccaacctgcaggagagcctgagaagcaaggagtgaaaccggtatgttgctcggcaacggcctggtctgtgccaagtgtttgctgacgcaacccccactggctggggcttggccataggccatcagcgcatgcgtggaacctttgtggctcctctgccgatccatactgcggaactcctagccgcttgttttgctcgcagccggtctggggcaaagctcatcggaactgacaattctgtcgtcctctcgcggaaatatacatcgtttccatggctgctaggttgtactgccaactgcatccttcgcgggacgtcctttgtttacgtcccgtcggcgctgaatcccgcggacgacccctctcggggccgcttgggactctctcgtccccttctccgtctgccgttccagccgaccacggggcgcacctctctttacgcggtctccccgtctgtgccttctcatctgccggtccgtgtgcacttcgcttcacctctgcacgttgcatggagaccaccgtgaacgcccatcagatcctgcccaaggtcttacataagaggactcttggactcccagcaatgtcggcgcgccctgtgccttctagttgccagccatctgttgtttgcccctcccccgtgccttccttgaccctggaaggtgccactcccactgtcctttcctaataaaatgaggaaattgcatcgcattgtctgagtaggtgtcattctattctggggggtggggtggggcaggacagcaagggggaggattgggaagacaatagcaggcatgctggggatgcggtgggctctatggggatccgctccggctcgagttaagccagccccgacacccgccaacacccgctgacgcgccctgacgggcttgtctgctcccggcatccgcttacagacaagctgtgaccgtctccgggagctgcatgtgtcagaggttttcaccgtcatcaccgaaacgcgcgagacgaaagggcctcgtgatacgcctatttttataggttaatgtcatgataataatggtttcttagacgtcaggtggcacttttcggggaaatgtgaagctttagaaaaactcatcgagcatcaaatgaaactgcaatttattcatatcaggattatcaataccatatttttgaaaaagccgtttctgtaatgaaggagaaaactcaccgaggcagttccataggatggcaagatcctggtatcggtctgcgattccgactcgtccaacatcaatacaacctattaatttcccctcgtcaaaaataaggttatcaagtgagaaatcaccatgagtgacgactgaatccggtgagaatggcaaaagtttatgcatttctttccagacttgttcaacaggccagccattacgctcgtcatcaaaatcactcgcatcaaccaaaccgttattcattcgtgattgcgcctgagcgagacgaaatacgcgatcgctgttaaaaggacaattacaaacaggaatcgaatgcaaccggcgcaggaacactgccagcgcatcaacaatattttcacctgaatcaggatattcttctaatacctggaatgctgtttttccggggatcgcagtggtgagtaaccatgcatcatcaggagtacggataaaatgcttgatggtcggaagaggcataaattccgtcagccagtttagtctgaccatctcatctgtaacatcattggcaacgctacctttgccatgtttcagaaacaactctggcgcatcgggcttcccatacaagcgatagattgtcgcacctgattgcccgacattatcgcgagcccatttatacccatataaatcagcatccatgttggaatttaatcgcggcctcgacgtttcccgttgaatatggctcataacaccccttgtattactgtttatgtaagcagacagttttattgttcatgatgatatatttttatcttgtgcaatgtaacatcagagattttgagacacgggccagagctgcaagcttctgtcagaccaagtttactcatatatactttagattgatttaaaacttcatttttaatttaaaaggatctaggtgaagatcctttatggtgaaggatgcgccacaggatactggcgcgcatacacagcacatctctttgcaggaaaaaaacgctatgaaaaatgttggttttatcggctggcgcggaatggtcggctctgttctcatgcaacgcatggtagaggagcgcgatttcgacgctattcgccctgttttcttttctacctcccagtttggacaggcggcgcccaccttcggcgacacctccaccggcacgctacaggacgcttttgatctggatgcgctaaaagcgctcgatatcatcgtgacctgccagggcggcgattataccaacgaaatttatccaaagctgcgcgaaagcggatggcagggttactggattgatgcggcttctacgctgcgcatgaaagatgatgccattattattctcgacccggtcaaccaggacgtgattaccgacggcct

SEQ ID NO: 531 - DNA, 5986 bp, synthetic construct
  misc_feature 1..5986: note = Synthetic DNA construct
  regulatory 1704..2007: note = enhancer - CMV; regulatory_class = enhancer
  regulatory 2008..2211: note = promoter - CMV promoter; regulatory_class = promoter
  gene 2308..2865: note = huIFNb
  misc_feature 2866..2874: note = GGS Linker
  gene 2875..2928: note = T2A
  gene 2929..3489: note = hIFNa2 NM_000605.4
  misc_feature 3503..4036: note = HPRE
  regulatory 4045..4269: note = polyA_signal - bGH poly(A) signal; regulatory_class = polyA_signal_sequence
  misc_feature 4248..4327: note = Duplexed DNA insert
  source 1..5986: mol_type = other DNA
  rep_origin 822..1410
  misc_feature 2299..2304: note = Kozak sequence
  regulatory 2197..2203: note = TATA signal; regulatory_class = TATA_box
  5'UTR 2212..2298
gaacaatggcgtgaagacctttgtgggcggtaactgtaccgttagcctgatgttgatgtcgctgggcggtctctttgcccataatctcgttgactgggtatccgtcgcgacctatcaggccgcctccggcggcggcgcgcgccatatgcgcgagctgttaacccagatgggtcagttgtatggccatgtcgccgatgaactggcgacgccgtcttccgcaattcttgatattgaacgcaaagttacggcattgacccgcagcggcgagctgccggttgataactttggcgtaccgctggcgggaagcctgatcccctggatcgacaaacagctcgataacggccagagccgcgaagagtggaaaggccaggcggaaaccaacaagattctcaatactgcctctgtgattccggttgatggtttgtgtgtgcgcgtcggcgcgctgcgctgtcacagccaggcgttcaccatcaagctgaaaaaagaggtatccattccgacggtggaagaactgctggcggcacataatccgtgggcgaaagtggtgccgaacgatcgtgatatcactatgcgcgaattaaccccggcggcggtgaccggcacgttgactacgccggttggtcgtctgcgtaagctgaacatggggccagagttcttgtcggcgtttaccgtaggcgaccagttgttatggggcgccgccgagccgctgcgtcgaatgctgcgccagttggcgtagttgataatctcatgaccaaaatcccttaacgtgagttttcgttccactgagcgtcagaccccgtagaaaagatcaaaggatcttcttgagatcctttttttctgcgcgtaatctgctgcttgcaaacaaaaaaaccaccgctaccagcggtggtttgtttgccggatcaagagctaccaactctttttccgaaggtaactggcttcagcagagcgcagataccaaatactgtccttctagtgtagccgtagttaggccaccacttcaagaactctgtagcaccgcctacatacctcgctctgctaatcctgttaccagtggctgctgccagtggcgataagtcgtgtcttaccgggttggactcaagacgatagttaccggataaggcgcagcggtcgggctgaacggggggttcgtgcacacagcccagcttggagcgaacgacctacaccgaactgagatacctacagcgtgagctatgagaaagcgccacgcttcccgaagggagaaaggcggacaggtatccggtaagcggcagggtcggaacaggagagcgcacgagggagcttccagggggaaacgcctggtatctttatagtcctgtcgggtttcgccacctctgacttgagcgtcgatttttgtgatgctcgtcaggggggcggagcctatggaaaaacgccagcaacgcggcctttttacggttcctggccttttgctggccttttgctcacatgttctttcctgcgttatcccctgattctgtggataaccgtattaccgcctttgagtgagctgataccgctcgccgcagccgaacgaccgagcgcagcgagtcagtgagcgaggaagcggtagagcgcccaatacgcaaaccgcctctccccgcgcgttggccgattcattaatgcagctggcacgacaggtttcccgactggaaagcgggcagtgagcgcaacgcaagtcgacccgttacataacttacggtaaatggcccgcctggctgaccgcccaacgacccccgcccattgacgtcaataatgacgtatgttcccatagtaacgccaatagggactttccattgacgtcaatgggtggagtatttacggtaaactgcccacttggcagtacatcaagtgtatcatatgccaagtacgccccctattgacgtcaatgacggtaaatggcccgcctggcattatgcccagtacatgaccttatgggactttcctacttggcagtacatctacgtattagtcatcgctattaccatggtgatgcggttttggcagtacatcaatgggcgtggatagcggtttgactcacggggatttccaagtctccaccccattgacgtcaatgggagtttgttttggcaccaaaatcaacgggactttccaaaatgtcgtaacaactccgccccattgacgcaaatgggcggtaggcgtgtacggtgggaggtctatataagcagagctggtttagtgaaccgtcagatccgctagcgattacgccaagctcgtctagacggcggccaagcttggcaatccggtactgttggtaaagccaccatgaccaacaagtgtctcctccaaattgctctcctgttgtgcttctccactacagctctttccatgagctacaacttgcttggattcctacaaagaagcagcaattttcagtgtcagaagctcctgtggcaattgaatgggaggcttgaatactgcctcaaggacaggatgaactttgacatccctgaggagattaagcagctgcagcagttccagaaggaggacgccgcattgaccatctatgagatgctccagaacatctttgctattttcagacaagattcatctagcactggctggaatgagactattgttgagaacctcctggctaatgtctatcatcagataaaccatctgaagacagtcctggaagaaaaactggagaaagaagatttcaccaggggaaaactcatgagcagtctgcacctgaaaagatattatgggaggattctgcattacctgaaggccaaggagtacagtcactgtgcctggaccatagtcagagtggaaatcctaaggaacttttacttcattaacagacttacaggttacctccgaaacggatcaggcgagggaagaggctcgcttctgacttgcggcgatgtcgaggaaaacccgggacctgccttgacctttgctttactggtggccctcctggtgctcagctgcaagtcaagctgctctgtgggctgtgatctgcctcaaacccacagcctgggtagcaggaggaccttgatgctcctggcacagatgaggagaatctctcttttctcctgcttgaaggacagacatgactttggatttccccaggaggagtttggcaaccagttccaaaaggctgaaaccatccctgtcctccatgagatgatccagcagatcttcaatctcttcagcacaaaggactcatctgctgcttgggatgagaccctcctagacaaattctacactgaactctaccagcagctgaatgacctggaagcctgtgtgatacagggggtgggggtgacagagactcccctgatgaaggaggactccattctggctgtgaggaaatacttccaaagaatcactctctatctgaaagagaagaaatacagcccttgtgcctgggaggttgtcagagcagaaatcatgagatctttttctttgtcaacaaacttgcaagaaagtttaagaagtaaggaatgaaaccggtatgttgctcggcaacggcctggtctgtgccaagtgtttgctgacgcaacccccactggctggggcttggccataggccatcagcgcatgcgtggaacctttgtggctcctctgccgatccatactgcggaactcctagccgcttgttttgctcgcagccggtctggggcaaagctcatcggaactgacaattctgtcgtcctctcgcggaaatatacatcgtttccatggctgctaggttgtactgccaactgcatccttcgcgggacgtcctttgtttacgtcccgtcggcgctgaatcccgcggacgacccctctcggggccgcttgggactctctcgtccccttctccgtctgccgttccagccgaccacggggcgcacctctctttacgcggtctccccgtctgtgccttctcatctgccggtccgtgtgcacttcgcttcacctctgcacgttgcatggagaccaccgtgaacgcccatcagatcctgcccaaggtcttacataagaggactcttggactcccagcaatgtcggcgcgccctgtgccttctagttgccagccatctgttgtttgcccctcccccgtgccttccttgaccctggaaggtgccactcccactgtcctttcctaataaaatgaggaaattgcatcgcattgtctgagtaggtgtcattctattctggggggtggggtggggcaggacagcaagggggaggattgggaagacaatagcaggcatgctggggatgcggtgggctctatggggatccgctccggctcgagttaagccagccccgacacccgccaacacccgctgacgcgccctgacgggcttgtctgctcccggcatccgcttacagacaagctgtgaccgtctccgggagctgcatgtgtcagaggttttcaccgtcatcaccgaaacgcgcgagacgaaagggcctcgtgatacgcctatttttataggttaatgtcatgataataatggtttcttagacgtcaggtggcacttttcggggaaatgtgaagctttagaaaaactcatcgagcatcaaatgaaactgcaatttattcatatcaggattatcaataccatatttttgaaaaagccgtttctgtaatgaaggagaaaactcaccgaggcagttccataggatggcaagatcctggtatcggtctgcgattccgactcgtccaacatcaatacaacctattaatttcccctcgtcaaaaataaggttatcaagtgagaaatcaccatgagtgacgactgaatccggtgagaatggcaaaagtttatgcatttctttccagacttgttcaacaggccagccattacgctcgtcatcaaaatcactcgcatcaaccaaaccgttattcattcgtgattgcgcctgagcgagacgaaatacgcgatcgctgttaaaaggacaattacaaacaggaatcgaatgcaaccggcgcaggaacactgccagcgcatcaacaatattttcacctgaatcaggatattcttctaatacctggaatgctgtttttccggggatcgcagtggtgagtaaccatgcatcatcaggagtacggataaaatgcttgatggtcggaagaggcataaattccgtcagccagtttagtctgaccatctcatctgtaacatcattggcaacgctacctttgccatgtttcagaaacaactctggcgcatcgggcttcccatacaagcgatagattgtcgcacctgattgcccgacattatcgcgagcccatttatacccatataaatcagcatccatgttggaatttaatcgcggcctcgacgtttcccgttgaatatggctcataacaccccttgtattactgtttatgtaagcagacagttttattgttcatgatgatatatttttatcttgtgcaatgtaacatcagagattttgagacacgggccagagctgcaagcttctgtcagaccaagtttactcatatatactttagattgatttaaaacttcatttttaatttaaaaggatctaggtgaagatcctttatggtgaaggatgcgccacaggatactggcgcgcatacacagcacatctctttgcaggaaaaaaacgctatgaaaaatgttggttttatcggctggcgcggaatggtcggctctgttctcatgcaacgcatggtagaggagcgcgatttcgacgctattcgccctgttttcttttctacctcccagtttggacaggcggcgcccaccttcggcgacacctccaccggcacgctacaggacgcttttgatctggatgcgctaaaagcgctcgatatcatcgtgacctgccagggcggcgattataccaacgaaatttatccaaagctgcgcgaaagcggatggcagggttactggattgatgcggcttctacgctgcgcatgaaagatgatgccattattattctcgacccggtcaaccaggacgtgattaccgacggcct

SEQ ID NO: 532 - DNA, 5847 bp, synthetic construct
  misc_feature 1..5847: note = Synthetic DNA construct
  regulatory 1704..2007: note = enhancer - CMV; regulatory_class = enhancer
  regulatory 2008..2211: note = promoter - CMV promoter; regulatory_class = promoter
  gene 2308..2865: note = huIFNb opt 29
  misc_feature 2866..2874: note = GSG linker opt 29
  gene 2875..2928: note = T2A opt 29
  gene 2929..3489: note = hIFNa2 NM_000605.4 opt 29
  misc_feature 3503..4036: note = HPRE
  regulatory 4067..4188: note = polyA_signal - SV40 poly(A) signal; regulatory_class = polyA_signal_sequence
  source 1..5847: mol_type = other DNA
  rep_origin 822..1410
  regulatory 2197..2203: note = TATA signal; regulatory_class = TATA_box
  misc_feature 2299..2304: note = Kozak sequence
  5'UTR 2212..2298
gaacaatggcgtgaagacctttgtgggcggtaactgtaccgttagcctgatgttgatgtcgctgggcggtctctttgcccataatctcgttgactgggtatccgtcgcgacctatcaggccgcctccggcggcggcgcgcgccatatgcgcgagctgttaacccagatgggtcagttgtatggccatgtcgccgatgaactggcgacgccgtcttccgcaattcttgatattgaacgcaaagttacggcattgacccgcagcggcgagctgccggttgataactttggcgtaccgctggcgggaagcctgatcccctggatcgacaaacagctcgataacggccagagccgcgaagagtggaaaggccaggcggaaaccaacaagattctcaatactgcctctgtgattccggttgatggtttgtgtgtgcgcgtcggcgcgctgcgctgtcacagccaggcgttcaccatcaagctgaaaaaagaggtatccattccgacggtggaagaactgctggcggcacataatccgtgggcgaaagtggtgccgaacgatcgtgatatcactatgcgcgaattaaccccggcggcggtgaccggcacgttgactacgccggttggtcgtctgcgtaagctgaacatggggccagagttcttgtcggcgtttaccgtaggcgaccagttgttatggggcgccgccgagccgctgcgtcgaatgctgcgccagttggcgtagttgataatctcatgaccaaaatcccttaacgtgagttttcgttccactgagcgtcagaccccgtagaaaagatcaaaggatcttcttgagatcctttttttctgcgcgtaatctgctgcttgcaaacaaaaaaaccaccgctaccagcggtggtttgtttgccggatcaagagctaccaactctttttccgaaggtaactggcttcagcagagcgcagataccaaatactgtccttctagtgtagccgtagttaggccaccacttcaagaactctgtagcaccgcctacatacctcgctctgctaatcctgttaccagtggctgctgccagtggcgataagtcgtgtcttaccgggttggactcaagacgatagttaccggataaggcgcagcggtcgggctgaacggggggttcgtgcacacagcccagcttggagcgaacgacctacaccgaactgagatacctacagcgtgagctatgagaaagcgccacgcttcccgaagggagaaaggcggacaggtatccggtaagcggcagggtcggaacaggagagcgcacgagggagcttccagggggaaacgcctggtatctttatagtcctgtcgggtttcgccacctctgacttgagcgtcgatttttgtgatgctcgtcaggggggcggagcctatggaaaaacgccagcaacgcggcctttttacggttcctggccttttgctggccttttgctcacatgttctttcctgcgttatcccctgattctgtggataaccgtattaccgcctttgagtgagctgataccgctcgccgcagccgaacgaccgagcgcagcgagtcagtgagcgaggaagcggtagagcgcccaatacgcaaaccgcctctccccgcgcgttggccgattcattaatgcagctggcacgacaggtttcccgactggaaagcgggcagtgagcgcaacgcaagtcgacccgttacataacttacggtaaatggcccgcctggctgaccgcccaacgacccccgcccattgacgtcaataatgacgtatgttcccatagtaacgccaatagggactttccattgacgtcaatgggtggagtatttacggtaaactgcccacttggcagtacatcaagtgtatcatatgccaagtacgccccctattgacgtcaatgacggtaaatggcccgcctggcattatgcccagtacatgaccttatgggactttcctacttggcagtacatctacgtattagtcatcgctattaccatggtgatgcggttttggcagtacatcaatgggcgtggatagcggtttgactcacggggatttccaagtctccaccccattgacgtcaatgggagtttgttttggcaccaaaatcaacgggactttccaaaatgtcgtaacaactccgccccattgacgcaaatgggcggtaggcgtgtacggtgggaggtctatataagcagagctggtttagtgaaccgtcagatccgctagcgattacgccaagctcgtctagacggcggccaagcttggcaatccggtactgttggtaaagccaccatgactaacaagtgcctgctgcagattgccctgctgctgtgcttcagcaccaccgccctctccatgagctacaacctgcttggattcctacagagaagcagcaattttcagtgtcagaagctgctgtggcagctgaacggcaggctggaatactgcctgaaggaccggatgaacttcgacattcctgaggagatcaagcagctgcagcagttccagaaggaggacgccgccctgaccatctacgagatgctgcagaacatctttgccatcttcagacaggactcttcttccaccggctggaacgagaccattgttgagaacctgctggccaacgtgtaccaccagatcaaccatctgaagaccgtgctggaggagaagctggagaaggaggacttcaccaggggaaaactgatgagctctctgcacctgaaaagatactacggcaggatcctgcactacctgaaggccaaggagtacagtcactgtgcctggaccatagtgagagtggagatcctgaggaacttctacttcatcaacagactgaccggctacctgaggaacggctctggcgagggtagaggctcgttactgacatgcggcgatgtcgaggagaacccgggacctgccttgacctttgctttgctggtggccctcctggtgctcagctgcaagtcaagctgctctgtgggctgtgacctgcctcaaacccacagcctgggtagcaggaggaccctcatgctcctggctcagatgaggagaatctccctcttcagctgcctgaaggacagacacgacttcggatttccccaggaggagtttggcaaccagttccaaaaggctgagaccatccccgtgctgcatgagatgatccagcagatcttcaacctgttcagcactaaagactcaagcgccgcctgggacgagaccctgctggataagttctacaccgagctgtaccagcagctgaacgacctggaggcctgcgtgattcagggcgtgggcgtgacagagacacccctgatgaaggaggacagcatcctggccgtgaggaagtacttccagagaatcaccctgtacctgaaggagaagaagtacagcccctgcgcctgggaggttgtgagagccgagatcatgaggagcttctctctgagcaccaacctgcaggagagcctgagaagcaaggagtgaaaccggtatgttgctcggcaacggcctggtctgtgccaagtgtttgctgacgcaacccccactggctggggcttggccataggccatcagcgcatgcgtggaacctttgtggctcctctgccgatccatactgcggaactcctagccgcttgttttgctcgcagccggtctggggcaaagctcatcggaactgacaattctgtcgtcctctcgcggaaatatacatcgtttccatggctgctaggttgtactgccaactgcatccttcgcgggacgtcctttgtttacgtcccgtcggcgctgaatcccgcggacgacccctctcggggccgcttgggactctctcgtccccttctccgtctgccgttccagccgaccacggggcgcacctctctttacgcggtctccccgtctgtgccttctcatctgccggtccgtgtgcacttcgcttcacctctgcacgttgcatggagaccaccgtgaacgcccatcagatcctgcccaaggtcttacataagaggactcttggactcccagcaatgtcggcgcgccctggctagctggccagacatgataagatacattgatgagtttggacaaaccacaactagaatgcagtgaaaaaaatgctttatttgtgaaatttgtgatgctattgctttatttgtaaccattataagctgcaataaacaagttccctgacgggcttgtctgctcccggcatccgcttacagacaagctgtgaccgtctccgggagctgcatgtgtcagaggttttcaccgtcatcaccgaaacgcgcgagacgaaagggcctcgtgatacgcctatttttataggttaatgtcatgataataatggtttcttagacgtcaggtggcacttttcggggaaatgtgaagctttagaaaaactcatcgagcatcaaatgaaactgcaatttattcatatcaggattatcaataccatatttttgaaaaagccgtttctgtaatgaaggagaaaactcaccgaggcagttccataggatggcaagatcctggtatcggtctgcgattccgactcgtccaacatcaatacaacctattaatttcccctcgtcaaaaataaggttatcaagtgagaaatcaccatgagtgacgactgaatccggtgagaatggcaaaagtttatgcatttctttccagacttgttcaacaggccagccattacgctcgtcatcaaaatcactcgcatcaaccaaaccgttattcattcgtgattgcgcctgagcgagacgaaatacgcgatcgctgttaaaaggacaattacaaacaggaatcgaatgcaaccggcgcaggaacactgccagcgcatcaacaatattttcacctgaatcaggatattcttctaatacctggaatgctgtttttccggggatcgcagtggtgagtaaccatgcatcatcaggagtacggataaaatgcttgatggtcggaagaggcataaattccgtcagccagtttagtctgaccatctcatctgtaacatcattggcaacgctacctttgccatgtttcagaaacaactctggcgcatcgggcttcccatacaagcgatagattgtcgcacctgattgcccgacattatcgcgagcccatttatacccatataaatcagcatccatgttggaatttaatcgcggcctcgacgtttcccgttgaatatggctcataacaccccttgtattactgtttatgtaagcagacagttttattgttcatgatgatatatttttatcttgtgcaatgtaacatcagagattttgagacacgggccagagctgcaagcttctgtcagaccaagtttactcatatatactttagattgatttaaaacttcatttttaatttaaaaggatctaggtgaagatcctttatggtgaaggatgcgccacaggatactggcgcgcatacacagcacatctctttgcaggaaaaaaacgctatgaaaaatgttggttttatcggctggcgcggaatggtcggctctgttctcatgcaacgcatggtagaggagcgcgatttcgacgctattcgccctgttttcttttctacctcccagtttggacaggcggcgcccaccttcggcgacacctccaccggcacgctacaggacgcttttgatctggatgcgctaaaagcgctcgatatcatcgtgacctgccagggcggcgattataccaacgaaatttatccaaagctgcgcgaaagcggatggcagggttactggattgatgcggcttctacgctgcgcatgaaagatgatgccattattattctcgacccggtcaaccaggacgtgattaccgacggcct

SEQ ID NO: 533 - DNA, 5847 bp, synthetic construct
  misc_feature 1..5847: note = Synthetic DNA construct
  regulatory 1704..2007: note = enhancer - CMV; regulatory_class = enhancer
  regulatory 2008..2211: note = promoter - CMV promoter; regulatory_class = promoter
  gene 2308..2865: note = huIFNb
  misc_feature 2866..2874: note = GGS Linker
  gene 2875..2928: note = T2A
  gene 2929..3489: note = hIFNa2 NM_000605.4
  misc_feature 3503..4036: note = HPRE
  regulatory 4067..4188: note = polyA_signal - SV40 poly(A) signal; regulatory_class = polyA_signal_sequence
  source 1..5847: mol_type = other DNA
  regulatory 2197..2203: note = TATA signal; regulatory_class = TATA_box
  misc_feature 2299..2304: note = Kozak sequence
  rep_origin 822..1410
  5'UTR 2212..2298
gaacaatggcgtgaagacctttgtgggcggtaactgtaccgttagcctgatgttgatgtcgctgggcggtctctttgcccataatctcgttgactgggtatccgtcgcgacctatcaggccgcctccggcggcggcgcgcgccatatgcgcgagctgttaacccagatgggtcagttgtatggccatgtcgccgatgaactggcgacgccgtcttccgcaattcttgatattgaacgcaaagttacggcattgacccgcagcggcgagctgccggttgataactttggcgtaccgctggcgggaagcctgatcccctggatcgacaaacagctcgataacggccagagccgcgaagagtggaaaggccaggcggaaaccaacaagattctcaatactgcctctgtgattccggttgatggtttgtgtgtgcgcgtcggcgcgctgcgctgtcacagccaggcgttcaccatcaagctgaaaaaagaggtatccattccgacggtggaagaactgctggcggcacataatccgtgggcgaaagtggtgccgaacgatcgtgatatcactatgcgcgaattaaccccggcggcggtgaccggcacgttgactacgccggttggtcgtctgcgtaagctgaacatggggccagagttcttgtcggcgtttaccgtaggcgaccagttgttatggggcgccgccgagccgctgcgtcgaatgctgcgccagttggcgtagttgataatctcatgaccaaaatcccttaacgtgagttttcgttccactgagcgtcagaccccgtagaaaagatcaaaggatcttcttgagatcctttttttctgcgcgtaatctgctgcttgcaaacaaaaaaaccaccgctaccagcggtggtttgtttgccggatcaagagctaccaactctttttccgaaggtaactggcttcagcagagcgcagataccaaatactgtccttctagtgtagccgtagttaggccaccacttcaagaactctgtagcaccgcctacatacctcgctctgctaatcctgttaccagtggctgctgccagtggcgataagtcgtgtcttaccgggttggactcaagacgatagttaccggataaggcgcagcggtcgggctgaacggggggttcgtgcacacagcccagcttggagcgaacgacctacaccgaactgagatacctacagcgtgagctatgagaaagcgccacgcttcccgaagggagaaaggcggacaggtatccggtaagcggcagggtcggaacaggagagcgcacgagggagcttccagggggaaacgcctggtatctttatagtcctgtcgggtttcgccacctctgacttgagcgtcgatttttgtgatgctcgtcaggggggcggagcctatggaaaaacgccagcaacgcggcctttttacggttcctggccttttgctggccttttgctcacatgttctttcctgcgttatcccctgattctgtggataaccgtattaccgcctttgagtgagctgataccgctcgccgcagccgaacgaccgagcgcagcgagtcagtgagcgaggaagcggtagagcgcccaatacgcaaaccgcctctccccgcgcgttggccgattcattaatgcagctggcacgacaggtttcccgactggaaagcgggcagtgagcgcaacgcaagtcgacccgttacataacttacggtaaatggcccgcctggctgaccgcccaacgacccccgcccattgacgtcaataatgacgtatgttcccatagtaacgccaatagggactttccattgacgtcaatgggtggagtatttacggtaaactgcccacttggcagtacatcaagtgtatcatatgccaagtacgccccctattgacgtcaatgacggtaaatggcccgcctggcattatgcccagtacatgaccttatgggactttcctacttggcagtacatctacgtattagtcatcgctattaccatggtgatgcggttttggcagtacatcaatgggcgtggatagcggtttgactcacggggatttccaagtctccaccccattgacgtcaatgggagtttgttttggcaccaaaatcaacgggactttccaaaatgtcgtaacaactccgccccattgacgcaaatgggcggtaggcgtgtacggtgggaggtctatataagcagagctggtttagtgaaccgtcagatccgctagcgattacgccaagctcgtctagacggcggccaagcttggcaatccggtactgttggtaaagccaccatgaccaacaagtgtctcctccaaattgctctcctgttgtgcttctccactacagctctttccatgagctacaacttgcttggattcctacaaagaagcagcaattttcagtgtcagaagctcctgtggcaattgaatgggaggcttgaatactgcctcaaggacaggatgaactttgacatccctgaggagattaagcagctgcagcagttccagaaggaggacgccgcattgaccatctatgagatgctccagaacatctttgctattttcagacaagattcatctagcactggctggaatgagactattgttgagaacctcctggctaatgtctatcatcagataaaccatctgaagacagtcctggaagaaaaactggagaaagaagatttcaccaggggaaaactcatgagcagtctgcacctgaaaagatattatgggaggattctgcattacctgaaggccaaggagtacagtcactgtgcctggaccatagtcagagtggaaatcctaaggaacttttacttcattaacagacttacaggttacctccgaaacggatcaggcgagggaagaggctcgcttctgacttgcggcgatgtcgaggaaaacccgggacctgccttgacctttgctttactggtggccctcctggtgctcagctgcaagtcaagctgctctgtgggctgtgatctgcctcaaacccacagcctgggtagcaggaggaccttgatgctcctggcacagatgaggagaatctctcttttctcctgcttgaaggacagacatgactttggatttccccaggaggagtttggcaaccagttccaaaaggctgaaaccatccctgtcctccatgagatgatccagcagatcttcaatctcttcagcacaaaggactcatctgctgcttgggatgagaccctcctagacaaattctacactgaactctaccagcagctgaatgacctggaagcctgtgtgatacagggggtgggggtgacagagactcccctgatgaaggaggactccattctggctgtgaggaaatacttccaaagaatcactctctatctgaaagagaagaaatacagcccttgtgcctgggaggttgtcagagcagaaatcatgagatctttttctttgtcaacaaacttgcaagaaagtttaagaagtaaggaatgaaaccggtatgttgctcggcaacggcctggtctgtgccaagtgtttgctgacgcaacccccactggctggggcttggccataggccatcagcgcatgcgtggaacctttgtggctcctctgccgatccatactgcggaactcctagccgcttgttttgctcgcagccggtctggggcaaagctcatcggaactgacaattctgtcgtcctctcgcggaaatatacatcgtttccatggctgctaggttgtactgccaactgcatccttcgcgggacgtcctttgtttacgtcccgtcggcgctgaatcccgcggacgacccctctcggggccgcttgggactctctcgtccccttctccgtctgccgttccagccgaccacggggcgcacctctctttacgcggtctccccgtctgtgccttctcatctgccggtccgtgtgcacttcgcttcacctctgcacgttgcatggagaccaccgtgaacgcccatcagatcctgcccaaggtcttacataagaggactcttggactcccagcaatgtcggcgcgccctggctagctggccagacatgataagatacattgatgagtttggacaaaccacaactagaatgcagtgaaaaaaatgctttatttgtgaaatttgtgatgctattgctttatttgtaaccattataagctgcaataaacaagttccctgacgggcttgtctgctcccggcatccgcttacagacaagctgtgaccgtctccgggagctgcatgtgtcagaggttttcaccgtcatcaccgaaacgcgcgagacgaaagggcctcgtgatacgcctatttttataggttaatgtcatgataataatggtttcttagacgtcaggtggcacttttcggggaaatgtgaagctttagaaaaactcatcgagcatcaaatgaaactgcaatttattcatatcaggattatcaataccatatttttgaaaaagccgtttctgtaatgaaggagaaaactcaccgaggcagttccataggatggcaagatcctggtatcggtctgcgattccgactcgtccaacatcaatacaacctattaatttcccctcgtcaaaaataaggttatcaagtgagaaatcaccatgagtgacgactgaatccggtgagaatggcaaaagtttatgcatttctttccagacttgttcaacaggccagccattacgctcgtcatcaaaatcactcgcatcaaccaaaccgttattcattcgtgattgcgcctgagcgagacgaaatacgcgatcgctgttaaaaggacaattacaaacaggaatcgaatgcaaccggcgcaggaacactgccagcgcatcaacaatattttcacctgaatcaggatattcttctaatacctggaatgctgtttttccggggatcgcagtggtgagtaaccatgcatcatcaggagtacggataaaatgcttgatggtcggaagaggcataaattccgtcagccagtttagtctgaccatctcatctgtaacatcattggcaacgctacctttgccatgtttcagaaacaactctggcgcatcgggcttcccatacaagcgatagattgtcgcacctgattgcccgacattatcgcgagcccatttatacccatataaatcagcatccatgttggaatttaatcgcggcctcgacgtttcccgttgaatatggctcataacaccccttgtattactgtttatgtaagcagacagttttattgttcatgatgatatatttttatcttgtgcaatgtaacatcagagattttgagacacgggccagagctgcaagcttctgtcagaccaagtttactcatatatactttagattgatttaaaacttcatttttaatttaaaaggatctaggtgaagatcctttatggtgaaggatgcgccacaggatactggcgcgcatacacagcacatctctttgcaggaaaaaaacgctatgaaaaatgttggttttatcggctggcgcggaatggtcggctctgttctcatgcaacgcatggtagaggagcgcgatttcgacgctattcgccctgttttcttttctacctcccagtttggacaggcggcgcccaccttcggcgacacctccaccggcacgctacaggacgcttttgatctggatgcgctaaaagcgctcgatatcatcgtgacctgccagggcggcgattataccaacgaaatttatccaaagctgcgcgaaagcggatggcagggttactggattgatgcggcttctacgctgcgcatgaaagatgatgccattattattctcgacccggtcaaccaggacgtgattaccgacggcct

SEQ ID NO: 534 - DNA, 6519 bp, synthetic construct
  misc_feature 1..6519: note = Synthetic DNA construct
  regulatory 1704..2007: note = enhancer - CMV; regulatory_class = enhancer
  regulatory 2008..2211: note = promoter - CMV promoter; regulatory_class = promoter
  gene 2308..2865: note = huIFNb opt 37
  regulatory 2869..3458: note = RBS - VCIP IRES ATUM; regulatory_class = ribosome_binding_site
  gene 3462..4022: note = hIFNa2 NM_000605.4 opt 37
  misc_feature 4036..4569: note = HPRE
  regulatory 4578..4802: note = polyA_signal - bGH poly(A) signal; regulatory_class = polyA_signal_sequence
  misc_feature 4781..4860: note = Duplexed DNA insert
  source 1..6519: mol_type = other DNA
  rep_origin 822..1410
  regulatory 2197..2203: note = TATA signal; regulatory_class = TATA_box
  misc_feature 2299..2304: note = Kozak sequence
  5'UTR 2212..2298
gaacaatggcgtgaagacctttgtgggcggtaactgtaccgttagcctgatgttgatgtcgctgggcggtctctttgcccataatctcgttgactgggtatccgtcgcgacctatcaggccgcctccggcggcggcgcgcgccatatgcgcgagctgttaacccagatgggtcagttgtatggccatgtcgccgatgaactggcgacgccgtcttccgcaattcttgatattgaacgcaaagttacggcattgacccgcagcggcgagctgccggttgataactttggcgtaccgctggcgggaagcctgatcccctggatcgacaaacagctcgataacggccagagccgcgaagagtggaaaggccaggcggaaaccaacaagattctcaatactgcctctgtgattccggttgatggtttgtgtgtgcgcgtcggcgcgctgcgctgtcacagccaggcgttcaccatcaagctgaaaaaagaggtatccattccgacggtggaagaactgctggcggcacataatccgtgggcgaaagtggtgccgaacgatcgtgatatcactatgcgcgaattaaccccggcggcggtgaccggcacgttgactacgccggttggtcgtctgcgtaagctgaacatggggccagagttcttgtcggcgtttaccgtaggcgaccagttgttatggggcgccgccgagccgctgcgtcgaatgctgcgccagttggcgtagttgataatctcatgaccaaaatcccttaacgtgagttttcgttccactgagcgtcagaccccgtagaaaagatcaaaggatcttcttgagatcctttttttctgcgcgtaatctgctgcttgcaaacaaaaaaaccaccgctaccagcggtggtttgtttgccggatcaagagctaccaactctttttccgaaggtaactggcttcagcagagcgcagataccaaatactgtccttctagtgtagccgtagttaggccaccacttcaagaactctgtagcaccgcctacatacctcgctctgctaatcctgttaccagtggctgctgccagtggcgataagtcgtgtcttaccgggttggactcaagacgatagttaccggataaggcgcagcggtcgggctgaacggggggttcgtgcacacagcccagcttggagcgaacgacctacaccgaactgagatacctacagcgtgagctatgagaaagcgccacgcttcccgaagggagaaaggcggacaggtatccggtaagcggcagggtcggaacaggagagcgcacgagggagcttccagggggaaacgcctggtatctttatagtcctgtcgggtttcgccacctctgacttgagcgtcgatttttgtgatgctcgtcaggggggcggagcctatggaaaaacgccagcaacgcggcctttttacggttcctggccttttgctggccttttgctcacatgttctttcctgcgttatcccctgattctgtggataaccgtattaccgcctttgagtgagctgataccgctcgccgcagccgaacgaccgagcgcagcgagtcagtgagcgaggaagcggtagagcgcccaatacgcaaaccgcctctccccgcgcgttggccgattcattaatgcagctggcacgacaggtttcccgactggaaagcgggcagtgagcgcaacgcaagtcgacccgttacataacttacggtaaatggcccgcctggctgaccgcccaacgacccccgcccattgacgtcaataatgacgtatgttcccatagtaacgccaatagggactttccattgacgtcaatgggtggagtatttacggtaaactgcccacttggcagtacatcaagtgtatcatatgccaagtacgccccctattgacgtcaatgacggtaaatggcccgcctggcattatgcccagtacatgaccttatgggactttcctacttggcagtacatctacgtattagtcatcgctattaccatggtgatgcggttttggcagtacatcaatgggcgtggatagcggtttgactcacggggatttccaagtctccaccccattgacgtcaatgggagtttgttttggcaccaaaatcaacgggactttccaaaatgtcgtaacaactccgccccattgacgcaaatgggcggtaggcgtgtacggtgggaggtctatataagcagagctggtttagtgaaccgtcagatccgctagcgattacgccaagctcgtctagacggcggccaagcttggcaatccggtactgttggtaaagccaccatgactaacaagtgccttctccaaatcgctctgctgctgtgcttttccactaccgccctctccatgagctacaacctgcttggattcctgcaaagaagcagcaatttccagtgccagaagctgctgtggcagttgaatgggaggcttgagtactgcctgaaggacaggatgaacttcgacatccccgaggagatcaagcagctgcagcagttccagaaggaggacgccgccctgaccatctacgagatgctgcagaacatcttcgctatcttcagacaagactcctctagcaccggctggaacgagaccattgttgagaacctgctggccaacgtctaccaccagatcaaccatctgaagaccgtgctggaagaaaaactggagaaggaggatttcaccaggggcaagttgatgtccagtctgcacctgaaaagatattatgggaggattctgcattacctgaaggccaaggagtactcgcactgtgcctggaccatcgtcagagtggaaatcctaaggaacttttacttcatcaacagattgacaggctacctccggaactgatgatagtggcagtttatggcgggcgtcctgcccgccaccctccagaaaacaaacccaggcgatcacagcagcagccgccgcggcagcagcaccaacagcaggaggagcaggaggagccggaggaggaggaggaggaggaggcaaagttagagttggggctggcgctccggagttgctgggctcagcgcagctcccattcattaaggaaccagctgcggaggaaggtggccgagcgcccgcgctgcccactcgctcgctcgcgcactcagacgcgcgccacaacagcgcgccccaagctgcgcagctctgcaaaagtttctgctcgggatctggctctcttccccttggactttagaacgatttagggttgacagaggaaagcagaggcgcgcaggaggagcagaaaacaccaccttctgcagttggaggcaggcagccccggctgcactctagccgccgcgcccggagccggggccgacccgccactatccgcagcagcctcggccaggaggcgacccgggcgcctgggtgtgtggctgctgttgcgggacgtcttcgcggggcgggaggctcgcgccgcagccagcgccatggccctcacctttgctcttctcgtggccctcctggtgctcagctgcaagtcgagctgctctgtgggctgtgatctgcctcaaacccacagcctgggtagcaggaggaccctgatgcttctggcacagatgaggagaatctctcttttttcctgcctgaaagacagacatgactttggatttccccaggaggagtttggcaaccagttccaaaaggctgagaccatccccgtgctgcatgagatgatccagcagatcttcaacctgttttctaccaaggactcctccgccgcctgggatgagaccctgttagacaaattctacaccgaactgtaccagcagctgaacgacctggaggcctgcgtgatccagggcgtgggcgtgacagagacacccctgatgaaggaggacagcatcctggctgtgaggaagtacttccagagaatcaccctgtacctgaaggagaagaagtacagcccctgcgcctgggaggttgtgagagccgagatcatgagatccttcagcctgagcaccaacctgcaggagagcctgagaagcaaggagtgaaaccggtatgttgctcggcaacggcctggtctgtgccaagtgtttgctgacgcaacccccactggctggggcttggccataggccatcagcgcatgcgtggaacctttgtggctcctctgccgatccatactgcggaactcctagccgcttgttttgctcgcagccggtctggggcaaagctcatcggaactgacaattctgtcgtcctctcgcggaaatatacatcgtttccatggctgctaggttgtactgccaactgcatccttcgcgggacgtcctttgtttacgtcccgtcggcgctgaatcccgcggacgacccctctcggggccgcttgggactctctcgtccccttctccgtctgccgttccagccgaccacggggcgcacctctctttacgcggtctccccgtctgtgccttctcatctgccggtccgtgtgcacttcgcttcacctctgcacgttgcatggagaccaccgtgaacgcccatcagatcctgcccaaggtcttacataagaggactcttggactcccagcaatgtcggcgcgccctgtgccttctagttgccagccatctgttgtttgcccctcccccgtgccttccttgaccctggaaggtgccactcccactgtcctttcctaataaaatgaggaaattgcatcgcattgtctgagtaggtgtcattctattctggggggtggggtggggcaggacagcaagggggaggattgggaagacaatagcaggcatgctggggatgcggtgggctctatggggatccgctccggctcgagttaagccagccccgacacccgccaacacccgctgacgcgccctgacgggcttgtctgctcccggcatccgcttacagacaagctgtgaccgtctccgggagctgcatgtgtcagaggttttcaccgtcatcaccgaaacgcgcgagacgaaagggcctcgtgatacgcctatttttataggttaatgtcatgataataatggtttcttagacgtcaggtggcacttttcggggaaatgtgaagctttagaaaaactcatcgagcatcaaatgaaactgcaatttattcatatcaggattatcaataccatatttttgaaaaagccgtttctgtaatgaaggagaaaactcaccgaggcagttccataggatggcaagatcctggtatcggtctgcgattccgactcgtccaacatcaatacaacctattaatttcccctcgtcaaaaataaggttatcaagtgagaaatcaccatgagtgacgactgaatccggtgagaatggcaaaagtttatgcatttctttccagacttgttcaacaggccagccattacgctcgtcatcaaaatcactcgcatcaaccaaaccgttattcattcgtgattgcgcctgagcgagacgaaatacgcgatcgctgttaaaaggacaattacaaacaggaatcgaatgcaaccggcgcaggaacactgccagcgcatcaacaatattttcacctgaatcaggatattcttctaatacctggaatgctgtttttccggggatcgcagtggtgagtaaccatgcatcatcaggagtacggataaaatgcttgatggtcggaagaggcataaattccgtcagccagtttagtctgaccatctcatctgtaacatcattggcaacgctacctttgccatgtttcagaaacaactctggcgcatcgggcttcccatacaagcgatagattgtcgcacctgattgcccgacattatcgcgagcccatttatacccatataaatcagcatccatgttggaatttaatcgcggcctcgacgtttcccgttgaatatggctcataacaccccttgtattactgtttatgtaagcagacagttttattgttcatgatgatatatttttatcttgtgcaatgtaacatcagagattttgagacacgggccagagctgcaagcttctgtcagaccaagtttactcatatatactttagattgatttaaaacttcatttttaatttaaaaggatctaggtgaagatcctttatggtgaaggatgcgccacaggatactggcgcgcatacacagcacatctctttgcaggaaaaaaacgctatgaaaaatgttggttttatcggctggcgcggaatggtcggctctgttctcatgcaacgcatggtagaggagcgcgatttcgacgctattcgccctgttttcttttctacctcccagtttggacaggcggcgcccaccttcggcgacacctccaccggcacgctacaggacgcttttgatctggatgcgctaaaagcgctcgatatcatcgtgacctgccagggcggcgattataccaacgaaatttatccaaagctgcgcgaaagcggatggcagggttactggattgatgcggcttctacgctgcgcatgaaagatgatgccattattattctcgacccggtcaaccaggacgtgattaccgacggcct

SEQ ID NO: 535 - DNA, 6519 bp, synthetic construct
  misc_feature 1..6519: note = Synthetic DNA construct
  regulatory 1704..2007: note = enhancer - CMV; regulatory_class = enhancer
  regulatory 2008..2211: note = promoter - CMV promoter; regulatory_class = promoter
  gene 2308..2865: note = huIFNb
  regulatory 2869..3458: note = RBS - VCIP IRES ATUM; regulatory_class = ribosome_binding_site
  gene 3462..4022: note = hIFNa2 NM_000605.4
  misc_feature 4036..4569: note = HPRE
  regulatory 4578..4802: note = polyA_signal - bGH poly(A) signal; regulatory_class = polyA_signal_sequence
  misc_feature 4781..4860: note = Duplexed DNA insert
  source 1..6519: mol_type = other DNA
  rep_origin 822..1410
  regulatory 2197..2203: note = TATA signal; regulatory_class = TATA_box
  misc_feature 2299..2304: note = Kozak sequence
  5'UTR 2212..2298
gaacaatggcgtgaagacctttgtgggcggtaactgtaccgttagcctgatgttgatgtcgctgggcggtctctttgcccataatctcgttgactgggtatccgtcgcgacctatcaggccgcctccggcggcggcgcgcgccatatgcgcgagctgttaacccagatgggtcagttgtatggccatgtcgccgatgaactggcgacgccgtcttccgcaattcttgatattgaacgcaaagttacggcattgacccgcagcggcgagctgccggttgataactttggcgtaccgctggcgggaagcctgatcccctggatcgacaaacagctcgataacggccagagccgcgaagagtggaaaggccaggcggaaaccaacaagattctcaatactgcctctgtgattccggttgatggtttgtgtgtgcgcgtcggcgcgctgcgctgtcacagccaggcgttcaccatcaagctgaaaaaagaggtatccattccgacggtggaagaactgctggcggcacataatccgtgggcgaaagtggtgccgaacgatcgtgatatcactatgcgcgaattaaccccggcggcggtgaccggcacgttgactacgccggttggtcgtctgcgtaagctgaacatggggccagagttcttgtcggcgtttaccgtaggcgaccagttgttatggggcgccgccgagccgctgcgtcgaatgctgcgccagttggcgtagttgataatctcatgaccaaaatcccttaacgtgagttttcgttccactgagcgtcagaccccgtagaaaagatcaaaggatcttcttgagatcctttttttctgcgcgtaatctgctgcttgcaaacaaaaaaaccaccgctaccagcggtggtttgtttgccggatcaagagctaccaactctttttccgaaggtaactggcttcagcagagcgcagataccaaatactgtccttctagtgtagccgtagttaggccaccacttcaagaactctgtagcaccgcctacatacctcgctctgctaatcctgttaccagtggctgctgccagtggcgataagtcgtgtcttaccgggttggactcaagacgatagttaccggataaggcgcagcggtcgggctgaacggggggttcgtgcacacagcccagcttggagcgaacgacctacaccgaactgagatacctacagcgtgagctatgagaaagcgccacgcttcccgaagggagaaaggcggacaggtatccggtaagcggcagggtcggaacaggagagcgcacgagggagcttccagggggaaacgcctggtatctttatagtcctgtcgggtttcgccacctctgacttgagcgtcgatttttgtgatgctcgtcaggggggcggagcctatggaaaaacgccagcaacgcggcctttttacggttcctggccttttgctggccttttgctcacatgttctttcctgcgttatcccctgattctgtggataaccgtattaccgcctttgagtgagctgataccgctcgccgcagccgaacgaccgagcgcagcgagtcagtgagcgaggaagcggtagagcgcccaatacgcaaaccgcctctccccgcgcgttggccgattcattaatgcagctggcacgacaggtttcccgactggaaagcgggcagtgagcgcaacgcaagtcgacccgttacataacttacggtaaatggcccgcctggctgaccgcccaacgacccccgcccattgacgtcaataatgacgtatgttcccatagtaacgccaatagggactttccattgacgtcaatgggtggagtatttacggtaaactgcccacttggcagtacatcaagtgtatcatatgccaagtacgccccctattgacgtcaatgacggtaaatggcccgcctggcattatgcccagtacatgaccttatgggactttcctacttggcagtacatctacgtattagtcatcgctattaccatggtgatgcggttttggcagtacatcaatgggcgtggatagcggtttgactcacggggatttccaagtctccaccccattgacgtcaatgggagtttgttttggcaccaaaatcaacgggactttccaaaatgtcgtaacaactccgccccattgacgcaaatgggcggtaggcgtgtacggtgggaggtctatataagcagagctggtttagtgaaccgtcagatccgctagcgattacgccaagctcgtctagacggcggccaagcttggcaatccggtactgttggtaaagccaccatgaccaacaagtgtctcctccaaattgctctcctgttgtgcttctccactacagctctttccatgagctacaacttgcttggattcctacaaagaagcagcaattttcagtgtcagaagctcctgtggcaattgaatgggaggcttgaatactgcctcaaggacaggatgaactttgacatccctgaggagattaagcagctgcagcagttccagaaggaggacgccgcattgaccatctatgagatgctccagaacatctttgctattttcagacaagattcatctagcactggctggaatgagactattgttgagaacctcctggctaatgtctatcatcagataaaccatctgaagacagtcctggaagaaaaactggagaaagaagatttcaccaggggaaaactcatgagcagtctgcacctgaaaagatattatgggaggattctgcattacctgaaggccaaggagtacagtcactgtgcctggaccatagtcagagtggaaatcctaaggaacttttacttcattaacagacttacaggttacctccgaaactgatgatagtggcagtttatggcgggcgtcctgcccgccaccctccagaaaacaaacccaggcgatcacagcagcagccgccgcggcagcagcaccaacagcaggaggagcaggaggagccggaggaggaggaggaggaggaggcaaagttagagttggggctggcgctccggagttgctgggctcagcgcagctcccattcattaaggaaccagctgcggaggaaggtggccgagcgcccgcgctgcccactcgctcgctcgcgcactcagacgcgcgccacaacagcgcgccccaagctgcgcagctctgcaaaagtttctgctcgggatctggctctcttccccttggactttagaacgatttagggttgacagaggaaagcagaggcgcgcaggaggagcagaaaacaccaccttctgcagttggaggcaggcagccccggctgcactctagccgccgcgcccggagccggggccgacccgccactatccgcagcagcctcggccaggaggcgacccgggcgcctgggtgtgtggctgctgttgcgggacgtcttcgcggggcgggaggctcgcgccgcagccagcgccatggccttgacctttgctttactggtggccctcctggtgctcagctgcaagtcaagctgctctgtgggctgtgatctgcctcaaacccacagcctgggtagcaggaggaccttgatgctcctggcacagatgaggagaatctctcttttctcctgcttgaaggacagacatgactttggatttccccaggaggagtttggcaaccagttccaaaaggctgaaaccatccctgtcctccatgagatgatccagcagatcttcaatctcttcagcacaaaggactcatctgctgcttgggatgagaccctcctagacaaattctacactgaactctaccagcagctgaatgacctggaagcctgtgtgatacagggggtgggggtgacagagactcccctgatgaaggaggactccattctggctgtgaggaaatacttccaaagaatcactctctatctgaaagagaagaaatacagcccttgtgcctgggaggttgtcagagcagaaatcatgagatctttttctttgtcaacaaacttgcaagaaagtttaagaagtaaggaatgaaaccggtatgttgctcggcaacggcctggtctgtgccaagtgtttgctgacgcaacccccactggctggggcttggccataggccatcagcgcatgcgtggaacctttgtggctcctctgccgatccatactgcggaactcctagccgcttgttttgctcgcagccggtctggggcaaagctcatcggaactgacaattctgtcgtcctctcgcggaaatatacatcgtttccatggctgctaggttgtactgccaactgcatccttcgcgggacgtcctttgtttacgtcccgtcggcgctgaatcccgcggacgacccctctcggggccgcttgggactctctcgtccccttctccgtctgccgttccagccgaccacggggcgcacctctctttacgcggtctccccgtctgtgccttctcatctgccggtccgtgtgcacttcgcttcacctctgcacgttgcatggagaccaccgtgaacgcccatcagatcctgcccaaggtcttacataagaggactcttggactcccagcaatgtcggcgcgccctgtgccttctagttgccagccatctgttgtttgcccctcccccgtgccttccttgaccctggaaggtgccactcccactgtcctttcctaataaaatgaggaaattgcatcgcattgtctgagtaggtgtcattctattctggggggtggggtggggcaggacagcaagggggaggattgggaagacaatagcaggcatgctggggatgcggtgggctctatggggatccgctccggctcgagttaagccagccccgacacccgccaacacccgctgacgcgccctgacgggcttgtctgctcccggcatccgcttacagacaagctgtgaccgtctccgggagctgcatgtgtcagaggttttcaccgtcatcaccgaaacgcgcgagacgaaagggcctcgtgatacgcctatttttataggttaatgtcatgataataatggtttcttagacgtcaggtggcacttttcggggaaatgtgaagctttagaaaaactcatcgagcatcaaatgaaactgcaatttattcatatcaggattatcaataccatatttttgaaaaagccgtttctgtaatgaaggagaaaactcaccgaggcagttccataggatggcaagatcctggtatcggtctgcgattccgactcgtccaacatcaatacaacctattaatttcccctcgtcaaaaataaggttatcaagtgagaaatcaccatgagtgacgactgaatccggtgagaatggcaaaagtttatgcatttctttccagacttgttcaacaggccagccattacgctcgtcatcaaaatcactcgcatcaaccaaaccgttattcattcgtgattgcgcctgagcgagacgaaatacgcgatcgctgttaaaaggacaattacaaacaggaatcgaatgcaaccggcgcaggaacactgccagcgcatcaacaatattttcacctgaatcaggatattcttctaatacctggaatgctgtttttccggggatcgcagtggtgagtaaccatgcatcatcaggagtacggataaaatgcttgatggtcggaagaggcataaattccgtcagccagtttagtctgaccatctcatctgtaacatcattggcaacgctacctttgccatgtttcagaaacaactctggcgcatcgggcttcccatacaagcgatagattgtcgcacctgattgcccgacattatcgcgagcccatttatacccatataaatcagcatccatgttggaatttaatcgcggcctcgacgtttcccgttgaatatggctcataacaccccttgtattactgtttatgtaagcagacagttttattgttcatgatgatatatttttatcttgtgcaatgtaacatcagagattttgagacacgggccagagctgcaagcttctgtcagaccaagtttactcatatatactttagattgatttaaaacttcatttttaatttaaaaggatctaggtgaagatcctttatggtgaaggatgcgccacaggatactggcgcgcatacacagcacatctctttgcaggaaaaaaacgctatgaaaaatgttggttttatcggctggcgcggaatggtcggctctgttctcatgcaacgcatggtagaggagcgcgatttcgacgctattcgccctgttttcttttctacctcccagtttggacaggcggcgcccaccttcggcgacacctccaccggcacgctacaggacgcttttgatctggatgcgctaaaagcgctcgatatcatcgtgacctgccagggcggcgattataccaacgaaatttatccaaagctgcgcgaaagcggatggcagggttactggattgatgcggcttctacgctgcgcatgaaagatgatgccattattattctcgacccggtcaaccaggacgtgattaccgacggcct

SEQ ID NO: 536 - DNA, 6380 bp, synthetic construct
  misc_feature 1..6380: note = Synthetic DNA construct
  regulatory 1704..2007: note = enhancer - CMV; regulatory_class = enhancer
  regulatory 2008..2211: note = promoter - CMV promoter; regulatory_class = promoter
  gene 2308..2865: note = huIFNb opt 37
  regulatory 2869..3458: note = RBS - VCIP IRES ATUM; regulatory_class = ribosome_binding_site
  gene 3462..4022: note = hIFNa2 NM_000605.4 opt 37
  misc_feature 4036..4569: note = HPRE
  regulatory 4600..4721: note = polyA_signal - SV40 poly(A) signal; regulatory_class = polyA_signal_sequence
  source 1..6380: mol_type = other DNA
  rep_origin 822..1410
  misc_feature 2299..2304: note = Kozak sequence
  regulatory 2197..2203: note = TATA signal; regulatory_class = TATA_box
  5'UTR 2212..2298
gaacaatggcgtgaagacctttgtgggcggtaactgtaccgttagcctgatgttgatgtcgctgggcggtctctttgcccataatctcgttgactgggtatccgtcgcgacctatcaggccgcctccggcggcggcgcgcgccatatgcgcgagctgttaacccagatgggtcagttgtatggccatgtcgccgatgaactggcgacgccgtcttccgcaattcttgatattgaacgcaaagttacggcattgacccgcagcggcgagctgccggttgataactttggcgtaccgctggcgggaagcctgatcccctggatcgacaaacagctcgataacggccagagccgcgaagagtggaaaggccaggcggaaaccaacaagattctcaatactgcctctgtgattccggttgatggtttgtgtgtgcgcgtcggcgcgctgcgctgtcacagccaggcgttcaccatcaagctgaaaaaagaggtatccattccgacggtggaagaactgctggcggcacataatccgtgggcgaaagtggtgccgaacgatcgtgatatcactatgcgcgaattaaccccggcggcggtgaccggcacgttgactacgccggttggtcgtctgcgtaagctgaacatggggccagagttcttgtcggcgtttaccgtaggcgaccagttgttatggggcgccgccgagccgctgcgtcgaatgctgcgccagttggcgtagttgataatctcatgaccaaaatcccttaacgtgagttttcgttccactgagcgtcagaccccgtagaaaagatcaaaggatcttcttgagatcctttttttctgcgcgtaatctgctgcttgcaaacaaaaaaaccaccgctaccagcggtggtttgtttgccggatcaagagctaccaactctttttccgaaggtaactggcttcagcagagcgcagataccaaatactgtccttctagtgtagccgtagttaggccaccacttcaagaactctgtagcaccgcctacatacctcgctctgctaatcctgttaccagtggctgctgccagtggcgataagtcgtgtcttaccgggttggactcaagacgatagttaccggataaggcgcagcggtcgggctgaacggggggttcgtgcacacagcccagcttggagcgaacgacctacaccgaactgagatacctacagcgtgagctatgagaaagcgccacgcttcccgaagggagaaaggcggacaggtatccggtaagcggcagggtcggaacaggagagcgcacgagggagcttccagggggaaacgcctggtatctttatagtcctgtcgggtttcgccacctctgacttgagcgtcgatttttgtgatgctcgtcaggggggcggagcctatggaaaaacgccagcaacgcggcctttttacggttcctggccttttgctggccttttgctcacatgttctttcctgcgttatcccctgattctgtggataaccgtattaccgcctttgagtgagctgataccgctcgccgcagccgaacgaccgagcgcagcgagtcagtgagcgaggaagcggtagagcgcccaatacgcaaaccgcctctccccgcgcgttggccgattcattaatgcagctggcacgacaggtttcccgactggaaagcgggcagtgagcgcaacgcaagtcgacccgttacataacttacggtaaatggcccgcctggctgaccgcccaacgacccccgcccattgacgtcaataatgacgtatgttcccatagtaacgccaatagggactttccattgacgtcaatgggtggagtatttacggtaaactgcccacttggcagtacatcaagtgtatcatatgccaagtacgccccctattgacgtcaatgacggtaaatggcccgcctggcattatgcccagtacatgaccttatgggactttcctacttggcagtacatctacgtattagtcatcgctattaccatggtgatgcggttttggcagtacatcaatgggcgtggatagcggtttgactcacggggatttccaagtctccaccccattgacgtcaatgggagtttgttttggcaccaaaatcaacgggactttccaaaatgtcgtaacaactccgccccattgacgcaaatgggcggtaggcgtgtacggtgggaggtctatataagcagagctggtttagtgaaccgtcagatccgctagcgattacgccaagctcgtctagacggcggccaagcttggcaatccggtactgttggtaaagccaccatgactaacaagtgccttctccaaatcgctctgctgctgtgcttttccactaccgccctctccatgagctacaacctgcttggattcctgcaaagaagcagcaatttccagtgccagaagctgctgtggcagttgaatgggaggcttgagtactgcctgaaggacaggatgaacttcgacatccccgaggagatcaagcagctgcagcagttccagaaggaggacgccgccctgaccatctacgagatgctgcagaacatcttcgctatcttcagacaagactcctctagcaccggctggaacgagaccattgttgagaacctgctggccaacgtctaccaccagatcaaccatctgaagaccgtgctggaagaaaaactggagaaggaggatttcaccaggggcaagttgatgtccagtctgcacctgaaaagatattatgggaggattctgcattacctgaaggccaaggagtactcgcactgtgcctggaccatcgtcagagtggaaatcctaaggaacttttacttcatcaacagattgacaggctacctccggaactgatgatagtggcagtttatggcgggcgtcctgcccgccaccctccagaaaacaaacccaggcgatcacagcagcagccgccgcggcagcagcaccaacagcaggaggagcaggaggagccggaggaggaggaggaggaggaggcaaagttagagttggggctggcgctccggagttgctgggctcagcgcagctcccattcattaaggaaccagctgcggaggaaggtggccgagcgcccgcgctgcccactcgctcgctcgcgcactcagacgcgcgccacaacagcgcgccccaagctgcgcagctctgcaaaagtttctgctcgggatctggctctcttccccttggactttagaacgatttagggttgacagaggaaagcagaggcgcgcaggaggagcagaaaacaccaccttctgcagttggaggcaggcagccccggctgcactctagccgccgcgcccggagccggggccgacccgccactatccgcagcagcctcggccaggaggcgacccgggcgcctgggtgtgtggctgctgttgcgggacgtcttcgcggggcgggaggctcgcgccgcagccagcgccatggccctcacctttgctcttctcgtggccctcctggtgctcagctgcaagtcgagctgctctgtgggctgtgatctgcctcaaacccacagcctgggtagcaggaggaccctgatgcttctggcacagatgaggagaatctctcttttttcctgcctgaaagacagacatgactttggatttccccaggaggagtttggcaaccagttccaaaaggctgagaccatccccgtgctgcatgagatgatccagcagatcttcaacctgttttctaccaaggactcctccgccgcctgggatgagaccctgttagacaaattctacaccgaactgtaccagcagctgaacgacctggaggcctgcgtgatccagggcgtgggcgtgacagagacacccctgatgaaggaggacagcatcctggctgtgaggaagtacttccagagaatcaccctgtacctgaaggagaagaagtacagcccctgcgcctgggaggttgtgagagccgagatcatgagatccttcagcctgagcaccaacctgcaggagagcctgagaagcaaggagtgaaaccggtatgttgctcggcaacggcctggtctgtgccaagtgtttgctgacgcaacccccactggctggggcttggccataggccatcagcgcatgcgtggaacctttgtggctcctctgccgatccatactgcggaactcctagccgcttgttttgctcgcagccggtctggggcaaagctcatcggaactgacaattctgtcgtcctctcgcggaaatatacatcgtttccatggctgctaggttgtactgccaactgcatccttcgcgggacgtcctttgtttacgtcccgtcggcgctgaatcccgcggacgacccctctcggggccgcttgggactctctcgtccccttctccgtctgccgttccagccgaccacggggcgcacctctctttacgcggtctccccgtctgtgccttctcatctgccggtccgtgtgcacttcgcttcacctctgcacgttgcatggagaccaccgtgaacgcccatcagatcctgcccaaggtcttacataagaggactcttggactcccagcaatgtcggcgcgccctggctagctggccagacatgataagatacattgatgagtttggacaaaccacaactagaatgcagtgaaaaaaatgctttatttgtgaaatttgtgatgctattgctttatttgtaaccattataagctgcaataaacaagttccctgacgggcttgtctgctcccggcatccgcttacagacaagctgtgaccgtctccgggagctgcatgtgtcagaggttttcaccgtcatcaccgaaacgcgcgagacgaaagggcctcgtgatacgcctatttttataggttaatgtcatgataataatggtttcttagacgtcaggtggcacttttcggggaaatgtgaagctttagaaaaactcatcgagcatcaaatgaaactgcaatttattcatatcaggattatcaataccatatttttgaaaaagccgtttctgtaatgaaggagaaaactcaccgaggcagttccataggatggcaagatcctggtatcggtctgcgattccgactcgtccaacatcaatacaacctattaatttcccctcgtcaaaaataaggttatcaagtgagaaatcaccatgagtgacgactgaatccggtgagaatggcaaaagtttatgcatttctttccagacttgttcaacaggccagccattacgctcgtcatcaaaatcactcgcatcaaccaaaccgttattcattcgtgattgcgcctgagcgagacgaaatacgcgatcgctgttaaaaggacaattacaaacaggaatcgaatgcaaccggcgcaggaacactgccagcgcatcaacaatattttcacctgaatcaggatattcttctaatacctggaatgctgtttttccggggatcgcagtggtgagtaaccatgcatcatcaggagtacggataaaatgcttgatggtcggaagaggcataaattccgtcagccagtttagtctgaccatctcatctgtaacatcattggcaacgctacctttgccatgtttcagaaacaactctggcgcatcgggcttcccatacaagcgatagattgtcgcacctgattgcccgacattatcgcgagcccatttatacccatataaatcagcatccatgttggaatttaatcgcggcctcgacgtttcccgttgaatatggctcataacaccccttgtattactgtttatgtaagcagacagttttattgttcatgatgatatatttttatcttgtgcaatgtaacatcagagattttgagacacgggccagagctgcaagcttctgtcagaccaagtttactcatatatactttagattgatttaaaacttcatttttaatttaaaaggatctaggtgaagatcctttatggtgaaggatgcgccacaggatactggcgcgcatacacagcacatctctttgcaggaaaaaaacgctatgaaaaatgttggttttatcggctggcgcggaatggtcggctctgttctcatgcaacgcatggtagaggagcgcgatttcgacgctattcgccctgttttcttttctacctcccagtttggacaggcggcgcccaccttcggcgacacctccaccggcacgctacaggacgcttttgatctggatgcgctaaaagcgctcgatatcatcgtgacctgccagggcggcgattataccaacgaaatttatccaaagctgcgcgaaagcggatggcagggttactggattgatgcggcttctacgctgcgcatgaaagatgatgccattattattctcgacccggtcaaccaggacgtgattaccgacggcct

SEQ ID NO: 537 - DNA, 6380 bp, synthetic construct
  misc_feature 1..6380: note = Synthetic DNA construct
  regulatory 1704..2007: note = enhancer - CMV; regulatory_class = enhancer
  regulatory 2008..2211: note = promoter - CMV promoter; regulatory_class = promoter
  gene 2308..2865: note = huIFNb
  regulatory 2869..3458: note = RBS - VCIP IRES ATUM; regulatory_class = ribosome_binding_site
  gene 3462..4022: note = hIFNa2 NM_000605.4
  misc_feature 4036..4569: note = HPRE
  regulatory 4600..4721: note = polyA_signal - SV40 poly(A) signal; regulatory_class = polyA_signal_sequence
  source 1..6380: mol_type = other DNA
  misc_feature 2299..2304: note = Kozak sequence
  regulatory 2197..2203: note = TATA signal; regulatory_class = TATA_box
  rep_origin 822..1410
  5'UTR 2212..2298
gaacaatggcgtgaagacctttgtgggcggtaactgtaccgttagcctgatgttgatgtcgctgggcggtctctttgcccataatctcgttgactgggtatccgtcgcgacctatcaggccgcctccggcggcggcgcgcgccatatgcgcgagctgttaacccagatgggtcagttgtatggccatgtcgccgatgaactggcgacgccgtcttccgcaattcttgatattgaacgcaaagttacggcattgacccgcagcggcgagctgccggttgataactttggcgtaccgctggcgggaagcctgatcccctggatcgacaaacagctcgataacggccagagccgcgaagagtggaaaggccaggcggaaaccaacaagattctcaatactgcctctgtgattccggttgatggtttgtgtgtgcgcgtcggcgcgctgcgctgtcacagccaggcgttcaccatcaagctgaaaaaagaggtatccattccgacggtggaagaactgctggcggcacataatccgtgggcgaaagtggtgccgaacgatcgtgatatcactatgcgcgaattaaccccggcggcggtgaccggcacgttgactacgccggttggtcgtctgcgtaagctgaacatggggccagagttcttgtcggcgtttaccgtaggcgaccagttgttatggggcgccgccgagccgctgcgtcgaatgctgcgccagttggcgtagttgataatctcatgaccaaaatcccttaacgtgagttttcgttccactgagcgtcagaccccgtagaaaagatcaaaggatcttcttgagatcctttttttctgcgcgtaatctgctgcttgcaaacaaaaaaaccaccgctaccagcggtggtttgtttgccggatcaagagctaccaactctttttccgaaggtaactggcttcagcagagcgcagataccaaatactgtccttctagtgtagccgtagttaggccaccacttcaagaactctgtagcaccgcctacatacctcgctctgctaatcctgttaccagtggctgctgccagtggcgataagtcgtgtcttaccgggttggactcaagacgatagttaccggataaggcgcagcggtcgggctgaacggggggttcgtgcacacagcccagcttggagcgaacgacctacaccgaactgagatacctacagcgtgagctatgagaaagcgccacgcttcccgaagggagaaaggcggacaggtatccggtaagcggcagggtcggaacaggagagcgcacgagggagcttccagggggaaacgcctggtatctttatagtcctgtcgggtttcgccacctctgacttgagcgtcgatttttgtgatgctcgtcaggggggcggagcctatggaaaaacgccagcaacgcggcctttttacggttcctggccttttgctggccttttgctcacatgttctttcctgcgttatcccctgattctgtggataaccgtattaccgcctttgagtgagctgataccgctcgccgcagccgaacgaccgagcgcagcgagtcagtgagcgaggaagcggtagagcgcccaatacgcaaaccgcctctccccgcgcgttggccgattcattaatgcagctggcacgacaggtttcccgactggaaagcgggcagtgagcgcaacgcaagtcgacccgttacataacttacggtaaatggcccgcctggctgaccgcccaacgacccccgcccattgacgtcaataatgacgtatgttcccatagtaacgccaatagggactttccattgacgtcaatgggtggagtatttacggtaaactgcccacttggcagtacatcaagtgtatcatatgccaagtacgccccctattgacgtcaatgacggtaaatggcccgcctggcattatgcccagtacatgaccttatgggactttcctacttggcagtacatctacgtattagtcatcgctattaccatggtgatgcggttttggcagtacatcaatgggcgtggatagcggtttgactcacggggatttccaagtctccaccccattgacgtcaatgggagtttgttttggcaccaaaatcaacgggactttccaaaatgtcgtaacaactccgccccattgacgcaaatgggcggtaggcgtgtacggtgggaggtctatataagcagagctggtttagtgaaccgtcagatccgctagcgattacgccaagctcgtctagacggcggccaagcttggcaatccggtactgttggtaaagccaccatgaccaacaagtgtctcctccaaattgctctcctgttgtgcttctccactacagctctttccatgagctacaacttgcttggattcctacaaagaagcagcaattttcagtgtcagaagctcctgtggcaattgaatgggaggcttgaatactgcctcaaggacaggatgaactttgacatccctgaggagattaagcagctgcagcagttccagaaggaggacgccgcattgaccatctatgagatgctccagaacatctttgctattttcagacaagattcatctagcactggctggaatgagactattgttgagaacctcctggctaatgtctatcatcagataaaccatctgaagacagtcctggaagaaaaactggagaaagaagatttcaccaggggaaaactcatgagcagtctgcacctgaaaagatattatgggaggattctgcattacctgaaggccaaggagtacagtcactgtgcctggaccatagtcagagtggaaatcctaaggaacttttacttcattaacagacttacaggttacctccgaaactgatgatagtggcagtttatggcgggcgtcctgcccgccaccctccagaaaacaaacccaggcgatcacagcagcagccgccgcggcagcagcaccaacagcaggaggagcaggaggagccggaggaggaggaggaggaggaggcaaagttagagttggggctggcgctccggagttgctgggctcagcgcagctcccattcattaaggaaccagctgcggaggaaggtggccgagcgcccgcgctgcccactcgctcgctcgcgcactcagacgcgcgccacaacagcgcgccccaagctgcgcagctctgcaaaagtttctgctcgggatctggctctcttccccttggactttagaacgatttagggttgacagaggaaagcagaggcgcgcaggaggagcagaaaacaccaccttctgcagttggaggcaggcagccccggctgcactctagccgccgcgcccggagccggggccgacccgccactatccgcagcagcctcggccaggaggcgacccgggcgcctgggtgtgtggctgctgttgcgggacgtcttcgcggggcgggaggctcgcgccgcagccagcgccatggccttgacctttgctttactggtggccctcctggtgctcagctgcaagtcaagctgctctgtgggctgtgatctgcctcaaacccacagcctgggtagcaggaggaccttgatgctcctggcacagatgaggagaatctctcttttctcctgcttgaaggacagacatgactttggatttccccaggaggagtttggcaaccagttccaaaaggctgaaaccatccctgtcctccatgagatgatccagcagatcttcaatctcttcagcacaaaggactcatctgctgcttgggatgagaccctcctagacaaattctacactgaactctaccagcagctgaatgacctggaagcctgtgtgatacagggggtgggggtgacagagactcccctgatgaaggaggactccattctggctgtgaggaaatacttccaaagaatcactctctatctgaaagagaagaaatacagcccttgtgcctgggaggttgtcagagcagaaatcatgagatctttttctttgtcaacaaacttgcaagaaagtttaagaagtaaggaatgaaaccggtatgttgctcggcaacggcctggtctgtgccaagtgtttgctgacgcaacccccactggctggggcttggccataggccatcagcgcatgcgtggaacctttgtggctcctctgccgatccatactgcggaactcctagccgcttgttttgctcgcagccggtctggggcaaagctcatcggaactgacaattctgtcgtcctctcgcggaaatatacatcgtttccatggctgctaggttgtactgccaactgcatccttcgcgggacgtcctttgtttacgtcccgtcggcgctgaatcccgcggacgacccctctcggggccgcttgggactctctcgtccccttctccgtctgccgttccagccgaccacggggcgcacctctctttacgcggtctccccgtctgtgccttctcatctgccggtccgtgtgcacttcgcttcacctctgcacgttgcatggagaccaccgtgaacgcccatcagatcctgcccaaggtcttacataagaggactcttggactcccagcaatgtcggcgcgccctggctagctggccagacatgataagatacattgatgagtttggacaaaccacaactagaatgcagtgaaaaaaatgctttatttgtgaaatttgtgatgctattgctttatttgtaaccattataagctgcaataaacaagttccctgacgggcttgtctgctcccggcatccgcttacagacaagctgtgaccgtctccgggagctgcatgtgtcagaggttttcaccgtcatcaccgaaacgcgcgagacgaaagggcctcgtgatacgcctatttttataggttaatgtcatgataataatggtttcttagacgtcaggtggcacttttcggggaaatgtgaagctttagaaaaactcatcgagcatcaaatgaaactgcaatttattcatatcaggattatcaataccatatttttgaaaaagccgtttctgtaatgaaggagaaaactcaccgaggcagttccataggatggcaagatcctggtatcggtctgcgattccgactcgtccaacatcaatacaacctattaatttcccctcgtcaaaaataaggttatcaagtgagaaatcaccatgagtgacgactgaatccggtgagaatggcaaaagtttatgcatttctttccagacttgttcaacaggccagccattacgctcgtcatcaaaatcactcgcatcaaccaaaccgttattcattcgtgattgcgcctgagcgagacgaaatacgcgatcgctgttaaaaggacaattacaaacaggaatcgaatgcaaccggcgcaggaacactgccagcgcatcaacaatattttcacctgaatcaggatattcttctaatacctggaatgctgtttttccggggatcgcagtggtgagtaaccatgcatcatcaggagtacggataaaatgcttgatggtcggaagaggcataaattccgtcagccagtttagtctgaccatctcatctgtaacatcattggcaacgctacctttgccatgtttcagaaacaactctggcgcatcgggcttcccatacaagcgatagattgtcgcacctgattgcccgacattatcgcgagcccatttatacccatataaatcagcatccatgttggaatttaatcgcggcctcgacgtttcccgttgaatatggctcataacaccccttgtattactgtttatgtaagcagacagttttattgttcatgatgatatatttttatcttgtgcaatgtaacatcagagattttgagacacgggccagagctgcaagcttctgtcagaccaagtttactcatatatactttagattgatttaaaacttcatttttaatttaaaaggatctaggtgaagatcctttatggtgaaggatgcgccacaggatactggcgcgcatacacagcacatctctttgcaggaaaaaaacgctatgaaaaatgttggttttatcggctggcgcggaatggtcggctctgttctcatgcaacgcatggtagaggagcgcgatttcgacgctattcgccctgttttcttttctacctcccagtttggacaggcggcgcccaccttcggcgacacctccaccggcacgctacaggacgcttttgatctggatgcgctaaaagcgctcgatatcatcgtgacctgccagggcggcgattataccaacgaaatttatccaaagctgcgcgaaagcggatggcagggttactggattgatgcggcttctacgctgcgcatgaaagatgatgccattattattctcgacccggtcaaccaggacgtgattaccgacggcct

SEQ ID NO: 538 - DNA, 6527 bp, synthetic construct
  misc_feature 1..6527: note = Synthetic DNA construct
  regulatory 1704..2007: note = enhancer - CMV; regulatory_class = enhancer
  regulatory 2008..2211: note = promoter - CMV promoter; regulatory_class = promoter
  regulatory 2299..2845: note = RBS - VCIP IRES; regulatory_class = ribosome_binding_site
  gene 2849..3409: note = hIFNa2 NM_000605.4 opt 35
  misc_feature 3410..3418: note = GSG linker opt 35
  gene 3419..3472: note = T2A opt 35
  gene 3473..4030: note = huIFNb opt 35
  misc_feature 4044..4577: note = HPRE
  regulatory 4586..4810: note = polyA_signal - bGH poly(A) signal; regulatory_class = polyA_signal_sequence
  misc_feature 4789..4868: note = Duplexed DNA insert
  source 1..6527: mol_type = other DNA
  rep_origin 822..1410
  regulatory 2197..2203: note = TATA signal; regulatory_class = TATA_box
  5'UTR 2212..2298
gaacaatggcgtgaagacctttgtgggcggtaactgtaccgttagcctgatgttgatgtcgctgggcggtctctttgcccataatctcgttgactgggtatccgtcgcgacctatcaggccgcctccggcggcggcgcgcgccatatgcgcgagctgttaacccagatgggtcagttgtatggccatgtcgccgatgaactggcgacgccgtcttccgcaattcttgatattgaacgcaaagttacggcattgacccgcagcggcgagctgccggttgataactttggcgtaccgctggcgggaagcctgatcccctggatcgacaaacagctcgataacggccagagccgcgaagagtggaaaggccaggcggaaaccaacaagattctcaatactgcctctgtgattccggttgatggtttgtgtgtgcgcgtcggcgcgctgcgctgtcacagccaggcgttcaccatcaagctgaaaaaagaggtatccattccgacggtggaagaactgctggcggcacataatccgtgggcgaaagtggtgccgaacgatcgtgatatcactatgcgcgaattaaccccggcggcggtgaccggcacgttgactacgccggttggtcgtctgcgtaagctgaacatggggccagagttcttgtcggcgtttaccgtaggcgaccagttgttatggggcgccgccgagccgctgcgtcgaatgctgcgccagttggcgtagttgataatctcatgaccaaaatcccttaacgtgagttttcgttccactgagcgtcagaccccgtagaaaagatcaaaggatcttcttgagatcctttttttctgcgcgtaatctgctgcttgcaaacaaaaaaaccaccgctaccagcggtggtttgtttgccggatcaagagctaccaactctttttccgaaggtaactggcttcagcagagcgcagataccaaatactgtccttctagtgtagccgtagttaggccaccacttcaagaactctgtagcaccgcctacatacctcgctctgctaatcctgttaccagtggctgctgccagtggcgataagtcgtgtcttaccgggttggactcaagacgatagttaccggataaggcgcagcggtcgggctgaacggggggttcgtgcacacagcccagcttggagcgaacgacctacaccgaactgagatacctacagcgtgagctatgagaaagcgccacgcttcccgaagggagaaaggcggacaggtatccggtaagcggcagggtcggaacaggagagcgcacgagggagcttccagggggaaacgcctggtatctttatagtcctgtcgggtttcgccacctctgacttgagcgtcgatttttgtgatgctcgtcaggggggcggagcctatggaaaaacgccagcaacgcggcctttttacggttcctggccttttgctggccttttgctcacatgttctttcctgcgttatcccctgattctgtggataaccgtattaccgcctttgagtgagctgataccgctcgccgcagccgaacgaccgagcgcagcgagtcagtgagcgaggaagcggtagagcgcccaatacgcaaaccgcctctccccgcgcgttggccgattcattaatgcagctggcacgacaggtttcccgactggaaagcgggcagtgagcgcaacgcaagtcgacccgttacataacttacggtaaatggcccgcctggctgaccgcccaacgacccccgcccattgacgtcaataatgacgtatgttcccatagtaacgccaatagggactttccattgacgtcaatgggtggagtatttacggtaaactgcccacttggcagtacatcaagtgtatcatatgccaagtacgccccctattgacgtcaatgacggtaaatggcccgcctggcattatgcccagtacatgaccttatgggactttcctacttggcagtacatctacgtattagtcatcgctattaccatggtgatgcggttttggcagtacatcaatgggcgtggatagcggtttgactcacggggatttccaagtctccaccccattgacgtcaatgggagtttgttttggcaccaaaatcaacgggactttccaaaatgtcgtaacaactccgccccattgacgcaaatgggcggtaggcgtgtacggtgggaggtctatataagcagagctggtttagtgaaccgtcagatccgctagcgattacgccaagctcgtctagacggcggccaagcttggcaatccggtactgttggtaaaagaaaacaaacccaggcgatcacagcagcagccgccgcggcagcagcaccaacagcaggaggagcaggaggagccggaggaggaggaggaggaggaggcaaagttagagttggggctggcgctccggagttgctgggctcagcgcagctcccattcattaaggaaccagctgcggaggaaggtggccgagcgcccgcgctgcccactcgctcgctcgcgcactcagacgcgcgccacaacagcgcgccccaagctgcgcagctctgcaaaagtttctgctcgggatctggctctcttccccttggactttagaacgatttagggttgacagaggaaagcagaggcgcgcaggaggagcagaaaacaccaccttctgcagttggaggcaggcagccccggctgcactctagccgccgcgcccggagccggggccgacccgccactatccgcagcagcctcggccaggaggcgacccgggcgcctgggtgtgtggctgctgttgcgggacgtcttcgcggggcgggaggctcgcgccgcagccagcgccatggccctcacctttgctcttctcgtggccctcctggtgctcagctgcaagtcgagctgctctgtgggctgtgatctgcctcaaacccacagcctgggtagcaggaggaccctgatgcttctggcacagatgaggagaatctctcttttcagctgcctcaaggataggcacgattttggatttccccaggaggagtttggcaaccagttccaaaaggctgagaccatccccgtgctgcatgagatgatccagcagatcttcaacctgttctccacaaaggactccagcgccgcttgggatgagaccctgttagacaaattctacaccgaactgtaccagcagctgaacgacctggaggcctgcgtgatccagggcgtgggcgtgacagagacacccctgatgaaggaggacagcatcctggctgtgaggaagtacttccagagaatcaccctgtacctgaaggagaagaagtacagcccctgcgcctgggaggttgtgagagccgagatcatgagatccttcagcctgagcaccaacctgcaggagagcctgagaagcaaggagggctctggcgagggaagaggcagccttctgacttgcggcgatgtcgaggaaaacccgggacctaccaacaagtgtctcctccaaattgccctgctgttgtgcttctccaccacagctctgtccatgagctacaacctgcttggattcctccaaagaagcagcaattttcagtgtcagaagctcctgtggcaattgaatgggaggctcgagtactgcctgaaggacaggatgaacttcgacatccccgaggagatcaagcagctgcagcagttccagaaggaggacgccgccctgaccatctacgagatgctgcagaacatctttgccatctttagacaggattccagctccaccggctggaacgagaccattgttgagaacctgctggccaacgtctaccaccagatcaaccatctgaagaccgtgctggaggagaagctggagaaggaagacttcaccaggggcaaactgatgagctctctgcacctgaaaagatactacggcaggatcctgcactacctgaaggccaaggagtacagtcactgtgcctggaccattgtgagagtggagatcctgaggaacttctacttcatcaacagactgaccggctacctgaggaactgaaaccggtatgttgctcggcaacggcctggtctgtgccaagtgtttgctgacgcaacccccactggctggggcttggccataggccatcagcgcatgcgtggaacctttgtggctcctctgccgatccatactgcggaactcctagccgcttgttttgctcgcagccggtctggggcaaagctcatcggaactgacaattctgtcgtcctctcgcggaaatatacatcgtttccatggctgctaggttgtactgccaactgcatccttcgcgggacgtcctttgtttacgtcccgtcggcgctgaatcccgcggacgacccctctcggggccgcttgggactctctcgtccccttctccgtctgccgttccagccgaccacggggcgcacctctctttacgcggtctccccgtctgtgccttctcatctgccggtccgtgtgcacttcgcttcacctctgcacgttgcatggagaccaccgtgaacgcccatcagatcctgcccaaggtcttacataagaggactcttggactcccagcaatgtcggcgcgccctgtgccttctagttgccagccatctgttgtttgcccctcccccgtgccttccttgaccctggaaggtgccactcccactgtcctttcctaataaaatgaggaaattgcatcgcattgtctgagtaggtgtcattctattctggggggtggggtggggcaggacagcaagggggaggattgggaagacaatagcaggcatgctggggatgcggtgggctctatggggatccgctccggctcgagttaagccagccccgacacccgccaacacccgctgacgcgccctgacgggcttgtctgctcccggcatccgcttacagacaagctgtgaccgtctccgggagctgcatgtgtcagaggttttcaccgtcatcaccgaaacgcgcgagacgaaagggcctcgtgatacgcctatttttataggttaatgtcatgataataatggtttcttagacgtcaggtggcacttttcggggaaatgtgaagctttagaaaaactcatcgagcatcaaatgaaactgcaatttattcatatcaggattatcaataccatatttttgaaaaagccgtttctgtaatgaaggagaaaactcaccgaggcagttccataggatggcaagatcctggtatcggtctgcgattccgactcgtccaacatcaatacaacctattaatttcccctcgtcaaaaataaggttatcaagtgagaaatcaccatgagtgacgactgaatccggtgagaatggcaaaagtttatgcatttctttccagacttgttcaacaggccagccattacgctcgtcatcaaaatcactcgcatcaaccaaaccgttattcattcgtgattgcgcctgagcgagacgaaatacgcgatcgctgttaaaaggacaattacaaacaggaatcgaatgcaaccggcgcaggaacactgccagcgcatcaacaatattttcacctgaatcaggatattcttctaatacctggaatgctgtttttccggggatcgcagtggtgagtaaccatgcatcatcaggagtacggataaaatgcttgatggtcggaagaggcataaattccgtcagccagtttagtctgaccatctcatctgtaacatcattggcaacgctacctttgccatgtttcagaaacaactctggcgcatcgggcttcccatacaagcgatagattgtcgcacctgattgcccgacattatcgcgagcccatttatacccatataaatcagcatccatgttggaatttaatcgcggcctcgacgtttcccgttgaatatggctcataacaccccttgtattactgtttatgtaagcagacagttttattgttcatgatgatatatttttatcttgtgcaatgtaacatcagagattttgagacacgggccagagctgcaagcttctgtcagaccaagtttactcatatatactttagattgatttaaaacttcatttttaatttaaaaggatctaggtgaagatcctttatggtgaaggatgcgccacaggatactggcgcgcatacacagcacatctctttgcaggaaaaaaacgctatgaaaaatgttggttttatcggctggcgcggaatggtcggctctgttctcatgcaacgcatggtagaggagcgcgatttcgacgctattcgccctgttttcttttctacctcccagtttggacaggcggcgcccaccttcggcgacacctccaccggcacgctacaggacgcttttgatctggatgcgctaaaagcgctcgatatcatcgtgacctgccagggcggcgattataccaacgaaatttatccaaagctgcgcgaaagcggatggcagggttactggattgatgcggcttctacgctgcgcatgaaagatgatgccattattattctcgacccggtcaaccaggacgtgattaccgacggcct

SEQ ID NO: 539 - DNA, 6527 bp, synthetic construct
  misc_feature 1..6527: note = Synthetic DNA construct
  regulatory 1704..2007: note = enhancer - CMV; regulatory_class = enhancer
  regulatory 2008..2211: note = promoter - CMV promoter; regulatory_class = promoter
  regulatory 2299..2845: note = RBS - VCIP IRES; regulatory_class = ribosome_binding_site
  gene 2849..3409: note = hIFNa2 NM_000605.4
  misc_feature 3410..3418: note = GGS Linker
  gene 3419..3472: note = T2A
  gene 3473..4030: note = huIFNb
  misc_feature 4044..4577: note = HPRE
  regulatory 4586..4810: note = polyA_signal - bGH poly(A) signal; regulatory_class = polyA_signal_sequence
  misc_feature 4789..4868: note = Duplexed DNA insert
  source 1..6527: mol_type = other DNA
  rep_origin 822..1410
  regulatory 2197..2203: note = TATA signal; regulatory_class = TATA_box
  5'UTR 2212..2298
gaacaatggcgtgaagacctttgtgggcggtaactgtaccgttagcctgatgttgatgtcgctgggcggtctctttgcccataatctcgttgactgggtatccgtcgcgacctatcaggccgcctccggcggcggcgcgcgccatatgcgcgagctgttaacccagatgggtcagttgtatggccatgtcgccgatgaactggcgacgccgtcttccgcaattcttgatattgaacgcaaagttacggcattgacccgcagcggcgagctgccggttgataactttggcgtaccgctggcgggaagcctgatcccctggatcgacaaacagctcgataacggccagagccgcgaagagtggaaaggccaggcggaaaccaacaagattctcaatactgcctctgtgattccggttgatggtttgtgtgtgcgcgtcggcgcgctgcgctgtcacagccaggcgttcaccatcaagctgaaaaaagaggtatccattccgacggtggaagaactgctggcggcacataatccgtgggcgaaagtggtgccgaacgatcgtgatatcactatgcgcgaattaaccccggcggcggtgaccggcacgttgactacgccggttggtcgtctgcgtaagctgaacatggggccagagttcttgtcggcgtttaccgtaggcgaccagttgttatggggcgccgccgagccgctgcgtcgaatgctgcgccagttggcgtagttgataatctcatgaccaaaatcccttaacgtgagttttcgttccactgagcgtcagaccccgtagaaaagatcaaaggatcttcttgagatcctttttttctgcgcgtaatctgctgcttgcaaacaaaaaaaccaccgctaccagcggtggtttgtttgccggatcaagagctaccaactctttttccgaaggtaactggcttcagcagagcgcagataccaaatactgtccttctagtgtagccgtagttaggccaccacttcaagaactctgtagcaccgcctacatacctcgctctgctaatcctgttaccagtggctgctgccagtggcgataagtcgtgtcttaccgggttggactcaagacgatagttaccggataaggcgcagcggtcgggctgaacggggggttcgtgcacacagcccagcttggagcgaacgacctacaccgaactgagatacctacagcgtgagctatgagaaagcgccacgcttcccgaagggagaaaggcggacaggtatccggtaagcggcagggtcggaacaggagagcgcacgagggagcttccagggggaaacgcctggtatctttatagtcctgtcgggtttcgccacctctgacttgagcgtcgatttttgtgatgctcgtcaggggggcggagcctatggaaaaacgccagcaacgcggcctttttacggttcctggccttttgctggccttttgctcacatgttctttcctgcgttatcccctgattctgtggataaccgtattaccgcctttgagtgagctgataccgctcgccgcagccgaacgaccgagcgcagcgagtcagtgagcgaggaagcggtagagcgcccaatacgcaaaccgcctctccccgcgcgttggccgattcattaatgcagctggcacgacaggtttcccgactggaaagcgggcagtgagcgcaacgcaagtcgacccgttacataacttacggtaaatggcccgcctggctgaccgcccaacgacccccgcccattgacgtcaataatgacgtatgttcccatagtaacgccaatagggactttccattgacgtcaatgggtggagtatttacggtaaactgcccacttggcagtacatcaagtgtatcatatgccaagtacgccccctattgacgtcaatgacggtaaatggcccgcctggcattatgcccagtacatgaccttatgggactttcctacttggcagtacatctacgtattagtcatcgctattaccatggtgatgcggttttggcagtacatcaatgggcgtggatagcggtttgactcacggggatttccaagtctccaccccattgacgtcaatgggagtttgttttggcaccaaaatcaacgggactttccaaaatgtcgtaacaactccgccccattgacgcaaatgggcggtaggcgtgtacggtgggaggtctatataagcagagctggtttagtgaaccgtcagatccgctagcgattacgccaagctcgtctagacggcggccaagcttggcaatccggtactgttggtaaaagaaaacaaacccaggcgatcacagcagcagccgccgcggcagcagcaccaacagcaggaggagcaggaggagccggaggaggaggaggaggaggaggcaaagttagagttggggctggcgctccggagttgctgggctcagcgcagctcccattcattaaggaaccagctgcggaggaaggtggccgagcgcccgcgctgcccactcgctcgctcgcgcactcagacgcgcgccacaacagcgcgccccaagctgcgcagctctgcaaaagtttctgctcgggatctggctctcttccccttggactttagaacgatttagggttgacagaggaaagcagaggcgcgcaggaggagcagaaaacaccaccttctgcagttggaggcaggcagccccggctgcactctagccgccgcgcccggagccggggccgacccgccactatccgcagcagcctcggccaggaggcgacccgggcgcctgggtgtgtggctgctgttgcgggacgtcttcgcggggcgggaggctcgcgccgcagccagcgccatggccttgacctttgctttactggtggccctcctggtgctcagctgcaagtcaagctgctctgtgggctgtgatctgcctcaaacccacagcctgggtagcaggaggaccttgatgctcctggcacagatgaggagaatctctcttttctcctgcttgaaggacagacatgactttggatttccccaggaggagtttggcaaccagttccaaaaggctgaaaccatccctgtcctccatgagatgatccagcagatcttcaatctcttcagcacaaaggactcatctgctgcttgggatgagaccctcctagacaaattctacactgaactctaccagcagctgaatgacctggaagcctgtgtgatacagggggtgggggtgacagagactcccctgatgaaggaggactccattctggctgtgaggaaatacttccaaagaatcactctctatctgaaagagaagaaatacagcccttgtgcctgggaggttgtcagagcagaaatcatgagatctttttctttgtcaacaaacttgcaagaaagtttaagaagtaaggaaggatcaggcgagggaagaggctcgcttctgacttgcggcgatgtcgaggaaaacccgggacctaccaacaagtgtctcctccaaattgctctcctgttgtgcttctccactacagctctttccatgagctacaacttgcttggattcctacaaagaagcagcaattttcagtgtcagaagctcctgtggcaattgaatgggaggcttgaatactgcctcaaggacaggatgaactttgacatccctgaggagattaagcagctgcagcagttccagaaggaggacgccgcattgaccatctatgagatgctccagaacatctttgctattttcagacaagattcatctagcactggctggaatgagactattgttgagaacctcctggctaatgtctatcatcagataaaccatctgaagacagtcctggaagaaaaactggagaaagaagatttcaccaggggaaaactcatgagcagtctgcacctgaaaagatattatgggaggattctgcattacctgaaggccaaggagtacagtcactgtgcctggaccatagtcagagtggaaatcctaaggaacttttacttcattaacagacttacaggttacctccgaaactgaaaccggtatgttgctcggcaacggcctggtctgtgccaagtgtttgctgacgcaacccccactggctggggcttggccataggccatcagcgcatgcgtggaacctttgtggctcctctgccgatccatactgcggaactcctagccgcttgttttgctcgcagccggtctggggcaaagctcatcggaactgacaattctgtcgtcctctcgcggaaatatacatcgtttccatggctgctaggttgtactgccaactgcatccttcgcgggacgtcctttgtttacgtcccgtcggcgctgaatcccgcggacgacccctctcggggccgcttgggactctctcgtccccttctccgtctgccgttccagccgaccacggggcgcacctctctttacgcggtctccccgtctgtgccttctcatctgccggtccgtgtgcacttcgcttcacctctgcacgttgcatggagaccaccgtgaacgcccatcagatcctgcccaaggtcttacataagaggactcttggactcccagcaatgtcggcgcgccctgtgccttctagttgccagccatctgttgtttgcccctcccccgtgccttccttgaccctggaaggtgccactcccactgtcctttcctaataaaatgaggaaattgcatcgcattgtctgagtaggtgtcattctattctggggggtggggtggggcaggacagcaagggggaggattgggaagacaatagcaggcatgctggggatgcggtgggctctatggggatccgctccggctcgagttaagccagccccgacacccgccaacacccgctgacgcgccctgacgggcttgtctgctcccggcatccgcttacagacaagctgtgaccgtctccgggagctgcatgtgtcagaggttttcaccgtcatcaccgaaacgcgcgagacgaaagggcctcgtgatacgcctatttttataggttaatgtcatgataataatggtttcttagacgtcaggtggcacttttcggggaaatgtgaagctttagaaaaactcatcgagcatcaaatgaaactgcaatttattcatatcaggattatcaataccatatttttgaaaaagccgtttctgtaatgaaggagaaaactcaccgaggcagttccataggatggcaagatcctggtatcggtctgcgattccgactcgtccaacatcaatacaacctattaatttcccctcgtcaaaaataaggttatcaagtgagaaatcaccatgagtgacgactgaatccggtgagaatggcaaaagtttatgcatttctttccagacttgttcaacaggccagccattacgctcgtcatcaaaatcactcgcatcaaccaaaccgttattcattcgtgattgcgcctgagcgagacgaaatacgcgatcgctgttaaaaggacaattacaaacaggaatcgaatgcaaccggcgcaggaacactgccagcgcatcaacaatattttcacctgaatcaggatattcttctaatacctggaatgctgtttttccggggatcgcagtggtgagtaaccatgcatcatcaggagtacggataaaatgcttgatggtcggaagaggcataaattccgtcagccagtttagtctgaccatctcatctgtaacatcattggcaacgctacctttgccatgtttcagaaacaactctggcgcatcgggcttcccatacaagcgatagattgtcgcacctgattgcccgacattatcgcgagcccatttatacccatataaatcagcatccatgttggaatttaatcgcggcctcgacgtttcccgttgaatatggctcataacaccccttgtattactgtttatgtaagcagacagttttattgttcatgatgatatatttttatcttgtgcaatgtaacatcagagattttgagacacgggccagagctgcaagcttctgtcagaccaagtttactcatatatactttagattgatttaaaacttcatttttaatttaaaaggatctaggtgaagatcctttatggtgaaggatgcgccacaggatactggcgcgcatacacagcacatctctttgcaggaaaaaaacgctatgaaaaatgttggttttatcggctggcgcggaatggtcggctctgttctcatgcaacgcatggtagaggagcgcgatttcgacgctattcgccctgttttcttttctacctcccagtttggacaggcggcgcccaccttcggcgacacctccaccggcacgctacaggacgcttttgatctggatgcgctaaaagcgctcgatatcatcgtgacctgccagggcggcgattataccaacgaaatttatccaaagctgcgcgaaagcggatggcagggttactggattgatgcggcttctacgctgcgcatgaaagatgatgccattattattctcgacccggtcaaccaggacgtgattaccgacggcct

SEQ ID NO: 540 - DNA, 6388 bp, synthetic construct
  misc_feature 1..6388: note = Synthetic DNA construct
  regulatory 1704..2007: note = enhancer - CMV; regulatory_class = enhancer
  regulatory 2008..2211: note = promoter - CMV promoter; regulatory_class = promoter
  regulatory 2299..2845: note = RBS - VCIP IRES; regulatory_class = ribosome_binding_site
  gene 2849..3409: note = hIFNa2 NM_000605.4 opt 35
  misc_feature 3410..3418: note = GSG linker opt 35
  gene 3419..3472: note = T2A opt 35
  gene 3473..4030: note = huIFNb opt 35
  misc_feature 4044..4577: note = HPRE
  regulatory 4608..4729: note = polyA_signal - SV40 poly(A) signal; regulatory_class = polyA_signal_sequence
  source 1..6388: mol_type = other DNA
  regulatory 2197..2203: note = TATA signal; regulatory_class = TATA_box
  rep_origin 822..1410
  5'UTR 2212..2298
gaacaatggcgtgaagacctttgtgggcggtaactgtaccgttagcctgatgttgatgtcgctgggcggtctctttgcccataatctcgttgactgggtatccgtcgcgacctatcaggccgcctccggcggcggcgcgcgccatatgcgcgagctgttaacccagatgggtcagttgtatggccatgtcgccgatgaactggcgacgccgtcttccgcaattcttgatattgaacgcaaagttacggcattgacccgcagcggcgagctgccggttgataactttggcgtaccgctggcgggaagcctgatcccctggatcgacaaacagctcgataacggccagagccgcgaagagtggaaaggccaggcggaaaccaacaagattctcaatactgcctctgtgattccggttgatggtttgtgtgtgcgcgtcggcgcgctgcgctgtcacagccaggcgttcaccatcaagctgaaaaaagaggtatccattccgacggtggaagaactgctggcggcacataatccgtgggcgaaagtggtgccgaacgatcgtgatatcactatgcgcgaattaaccccggcggcggtgaccggcacgttgactacgccggttggtcgtctgcgtaagctgaacatggggccagagttcttgtcggcgtttaccgtaggcgaccagttgttatggggcgccgccgagccgctgcgtcgaatgctgcgccagttggcgtagttgataatctcatgaccaaaatcccttaacgtgagttttcgttccactgagcgtcagaccccgtagaaaagatcaaaggatcttcttgagatcctttttttctgcgcgtaatctgctgcttgcaaacaaaaaaaccaccgctaccagcggtggtttgtttgccggatcaagagctaccaactctttttccgaaggtaactggcttcagcagagcgcagataccaaatactgtccttctagtgtagccgtagttaggccaccacttcaagaactctgtagcaccgcctacatacctcgctctgctaatcctgttaccagtggctgctgccagtggcgataagtcgtgtcttaccgggttggactcaagacgatagttaccggataaggcgcagcggtcgggctgaacggggggttcgtgcacacagcccagcttggagcgaacgacctacaccgaactgagatacctacagcgtgagctatgagaaagcgccacgcttcccgaagggagaaaggcggacaggtatccggtaagcggcagggtcggaacaggagagcgcacgagggagcttccagggggaaacgcctggtatctttatagtcctgtcgggtttcgccacctctgacttgagcgtcgatttttgtgatgctcgtcaggggggcggagcctatggaaaaacgccagcaacgcggcctttttacggttcctggccttttgctggccttttgctcacatgttctttcctgcgttatcccctgattctgtggataaccgtattaccgcctttgagtgagctgataccgctcgccgcagccgaacgaccgagcgcagcgagtcagtgagcgaggaagcggtagagcgcccaatacgcaaaccgcctctccccgcgcgttggccgattcattaatgcagctggcacgacaggtttcccgactggaaagcgggcagtgagcgcaacgcaagtcgacccgttacataacttacggtaaatggcccgcctggctgaccgcccaacgacccccgcccattgacgtcaataatgacgtatgttcccatagtaacgccaatagggactttccattgacgtcaatgggtggagtatttacggtaaactgcccacttggcagtacatcaagtgtatcatatgccaagtacgccccctattgacgtcaatgacggtaaatggcccgcctggcattatgcccagtacatgaccttatgggactttcctacttggcagtacatctacgtattagtcatcgctattaccatggtgatgcggttttggcagtacatcaatgggcgtggatagcggtttgactcacggggatttccaagtctccaccccattgacgtcaatgggagtttgttttggcaccaaaatcaacgggactttccaaaatgtcgtaacaactccgccccattgacgcaaatgggcggtaggcgtgtacggtgggaggtctatataagcagagctggtttagtgaaccgtcagatccgctagcgattacgccaagctcgtctagacggcggccaagcttggcaatccggtactgttggtaaaagaaaacaaacccaggcgatcacagcagcagccgccgcggcagcagcaccaacagcaggaggagcaggaggagccggaggaggaggaggaggaggaggcaaagttagagttggggctggcgctccggagttgctgggctcagcgcagctcccattcattaaggaaccagctgcggaggaaggtggccgagcgcccgcgctgcccactcgctcgctcgcgcactcagacgcgcgccacaacagcgcgccccaagctgcgcagctctgcaaaagtttctgctcgggatctggctctcttccccttggactttagaacgatttagggttgacagaggaaagcagaggcgcgcaggaggagcagaaaacaccaccttctgcagttggaggcaggcagccccggctgcactctagccgccgcgcccggagccggggccgacccgccactatccgcagcagcctcggccaggaggcgacccgggcgcctgggtgtgtggctgctgttgcgggacgtcttcgcggggcgggaggctcgcgccgcagccagcgccatggccctcacctttgctcttctcgtggccctcctggtgctcagctgcaagtcgagctgctctgtgggctgtgatctgcctcaaacccacagcctgggtagcaggaggaccctgatgcttctggcacagatgaggagaatctctcttttcagctgcctcaaggataggcacgattttggatttccccaggaggagtttggcaaccagttccaaaaggctgagaccatccccgtgctgcatgagatgatccagcagatcttcaacctgttctccacaaaggactccagcgccgcttgggatgagaccctgttagacaaattctacaccgaactgtaccagcagctgaacgacctggaggcctgcgtgatccagggcgtgggcgtgacagagacacccctgatgaaggaggacagcatcctggctgtgaggaagtacttccagagaatcaccctgtacctgaaggagaagaagtacagcccctgcgcctgggaggttgtgagagccgagatcatgagatccttcagcctgagcaccaacctgcaggagagcctgagaagcaaggagggctctggcgagggaagaggcagccttctgacttgcggcgatgtcgaggaaaacccgggacctaccaacaagtgtctcctccaaattgccctgctgttgtgcttctccaccacagctctgtccatgagctacaacctgcttggattcctccaaagaagcagcaattttcagtgtcagaagctcctgtggcaattgaatgggaggctcgagtactgcctgaaggacaggatgaacttcgacatccccgaggagatcaagcagctgcagcagttccagaaggaggacgccgccctgaccatctacgagatgctgcagaacatctttgccatctttagacaggattccagctccaccggctggaacgagaccattgttgagaacctgctggccaacgtctaccaccagatcaaccatctgaagaccgtgctggaggagaagctggagaaggaagacttcaccaggggcaaactgatgagctctctgcacctgaaaagatactacggcaggatcctgcactacctgaaggccaaggagtacagtcactgtgcctggaccattgtgagagtggagatcctgaggaacttctacttcatcaacagactgaccggctacctgaggaactgaaaccggtatgttgctcggcaacggcctggtctgtgccaagtgtttgctgacgcaacccccactggctggggcttggccataggccatcagcgcatgcgtggaacctttgtggctcctctgccgatccatactgcggaactcctagccgcttgttttgctcgcagccggtctggggcaaagctcatcggaactgacaattctgtcgtcctctcgcggaaatatacatcgtttccatggctgctaggttgtactgccaactgcatccttcgcgggacgtcctttgtttacgtcccgtcggcgctgaatcccgcggacgacccctctcggggccgcttgggactctctcgtccccttctccgtctgccgttccagccgaccacggggcgcacctctctttacgcggtctccccgtctgtgccttctcatctgccggtccgtgtgcacttcgcttcacctctgcacgttgcatggagaccaccgtgaacgcccatcagatcctgcccaaggtcttacataagaggactcttggactcccagcaatgtcggcgcgccctggctagctggccagacatgataagatacattgatgagtttggacaaaccacaactagaatgcagtgaaaaaaatgctttatttgtgaaatttgtgatgctattgctttatttgtaaccattataagctgcaataaacaagttccctgacgggcttgtctgctcccggcatccgcttacagacaagctgtgaccgtctccgggagctgcatgtgtcagaggttttcaccgtcatcaccgaaacgcgcgagacgaaagggcctcgtgatacgcctatttttataggttaatgtcatgataataatggtttcttagacgtcaggtggcacttttcggggaaatgtgaagctttagaaaaactcatcgagcatcaaatgaaactgcaatttattcatatcaggattatcaataccatatttttgaaaaagccgtttctgtaatgaaggagaaaactcaccgaggcagttccataggatggcaagatcctggtatcggtctgcgattccgactcgtccaacatcaatacaacctattaatttcccctcgtcaaaaataaggttatcaagtgagaaatcaccatgagtgacgactgaatccggtgagaatggcaaaagtttatgcatttctttccagacttgttcaacaggccagccattacgctcgtcatcaaaatcactcgcatcaaccaaaccgttattcattcgtgattgcgcctgagcgagacgaaatacgcgatcgctgttaaaaggacaattacaaacaggaatcgaatgcaaccggcgcaggaacactgccagcgcatcaacaatattttcacctgaatcaggatattcttctaatacctggaatgctgtttttccggggatcgcagtggtgagtaaccatgcatcatcaggagtacggataaaatgcttgatggtcggaagaggcataaattccgtcagccagtttagtctgaccatctcatctgtaacatcattggcaacgctacctttgccatgtttcagaaacaactctggcgcatcgggcttcccatacaagcgatagattgtcgcacctgattgcccgacattatcgcgagcccatttatacccatataaatcagcatccatgttggaatttaatcgcggcctcgacgtttcccgttgaatatggctcataacaccccttgtattactgtttatgtaagcagacagttttattgttcatgatgatatatttttatcttgtgcaatgtaacatcagagattttgagacacgggccagagctgcaagcttctgtcagaccaagtttactcatatatactttagattgatttaaaacttcatttttaatttaaaaggatctaggtgaagatcctttatggtgaaggatgcgccacaggatactggcgcgcatacacagcacatctctttgcaggaaaaaaacgctatgaaaaatgttggttttatcggctggcgcggaatggtcggctctgttctcatgcaacgcatggtagaggagcgcgatttcgacgctattcgccctgttttcttttctacctcccagtttggacaggcggcgcccaccttcggcgacacctccaccggcacgctacaggacgcttttgatctggatgcgctaaaagcgctcgatatcatcgtgacctgccagggcggcgattataccaacgaaatttatccaaagctgcgcgaaagcggatggcagggttactggattgatgcggcttctacgctgcgcatgaaagatgatgccattattattctcgacccggtcaaccaggacgtgattaccgacggcct

SEQ ID NO: 541 - DNA, 6388 bp, synthetic construct
  misc_feature 1..6388: note = Synthetic DNA construct
  regulatory 1704..2007: note = enhancer - CMV; regulatory_class = enhancer
  regulatory 2008..2211: note = promoter - CMV promoter; regulatory_class = promoter
  regulatory 2299..2845: note = RBS - VCIP IRES; regulatory_class = ribosome_binding_site
  gene 2849..3409: note = hIFNa2 NM_000605.4
  misc_feature 3410..3418: note = GGS Linker
  gene 3419..3472: note = T2A
  gene 3473..4030: note = huIFNb
  misc_feature 4044..4577: note = HPRE
  regulatory 4608..4729: note = polyA_signal - SV40 poly(A) signal; regulatory_class = polyA_signal_sequence
  source 1..6388: mol_type = other DNA
  regulatory 2197..2203: note = TATA signal; regulatory_class = TATA_box
  rep_origin 822..1410
  5'UTR 2212..2298
gaacaatggcgtgaagacctttgtgggcggtaactgtaccgttagcctgatgttgatgtcgctgggcggtctctttgcccataatctcgttgactgggtatccgtcgcgacctatcaggccgcctccggcggcggcgcgcgccatatgcgcgagctgttaacccagatgggtcagttgtatggccatgtcgccgatgaactggcgacgccgtcttccgcaattcttgatattgaacgcaaagttacggcattgacccgcagcggcgagctgccggttgataactttggcgtaccgctggcgggaagcctgatcccctggatcgacaaacagctcgataacggccagagccgcgaagagtggaaaggccaggcggaaaccaacaagattctcaatactgcctctgtgattccggttgatggtttgtgtgtgcgcgtcggcgcgctgcgctgtcacagccaggcgttcaccatcaagctgaaaaaagaggtatccattccgacggtggaagaactgctggcggcacataatccgtgggcgaaagtggtgccgaacgatcgtgatatcactatgcgcgaattaaccccggcggcggtgaccggcacgttgactacgccggttggtcgtctgcgtaagctgaacatggggccagagttcttgtcggcgtttaccgtaggcgaccagttgttatggggcgccgccgagccgctgcgtcgaatgctgcgccagttggcgtagttgataatctcatgaccaaaatcccttaacgtgagttttcgttccactgagcgtcagaccccgtagaaaagatcaaaggatcttcttgagatcctttttttctgcgcgtaatctgctgcttgcaaacaaaaaaaccaccgctaccagcggtggtttgtttgccggatcaagagctaccaactctttttccgaaggtaactggcttcagcagagcgcagataccaaatactgtccttctagtgtagccgtagttaggccaccacttcaagaactctgtagcaccgcctacatacctcgctctgctaatcctgttaccagtggctgctgccagtggcgataagtcgtgtcttaccgggttggactcaagacgatagttaccggataaggcgcagcggtcgggctgaacggggggttcgtgcacacagcccagcttggagcgaacgacctacaccgaactgagatacctacagcgtgagctatgagaaagcgccacgcttcccgaagggagaaaggcggacaggtatccggtaagcggcagggtcggaacaggagagcgcacgagggagcttccagggggaaacgcctggtatctttatagtcctgtcgggtttcgccacctctgacttgagcgtcgatttttgtgatgctcgtcaggggggcggagcctatggaaaaacgccagcaacgcggcctttttacggttcctggccttttgctggccttttgctcacatgttctttcctgcgttatcccctgattctgtggataaccgtattaccgcctttgagtgagctgataccgctcgccgcagccgaacgaccgagcgcagcgagtcagtgagcgaggaagcggtagagcgcccaatacgcaaaccgcctctccccgcgcgttggccgattcattaatgcagctggcacgacaggtttcccgactggaaagcgggcagtgagcgcaacgcaagtcgacccgttacataacttacggtaaatggcccgcctggctgaccgcccaacgacccccgcccattgacgtcaataatgacgtatgttcccatagtaacgccaatagggactttccattgacgtcaatgggtggagtatttacggtaaactgcccacttggcagtacatcaagtgtatcatatgccaagtacgccccctattgacgtcaatgacggtaaatggcccgcctggcattatgcccagtacatgaccttatgggactttcctacttggcagtacatctacgtattagtcatcgctattaccatggtgatgcggttttggcagtacatcaatgggcgtggatagcggtttgactcacggggatttccaagtctccaccccattgacgtcaatgggagtttgttttggcaccaaaatcaacgggactttccaaaatgtcgtaacaactccgccccattgacgcaaatgggcggtaggcgtgtacggtgggaggtctatataagcagagctggtttagtgaaccgtcagatccgctagcgattacgccaagctcgtctagacggcggccaagcttggcaatccggtactgttggtaaaagaaaacaaacccaggcgatcacagcagcagccgccgcggcagcagcaccaacagcaggaggagcaggaggagccggaggaggaggaggaggaggaggcaaagttagagttggggctggcgctccggagttgctgggctcagcgcagctcccattcattaaggaaccagctgcggaggaaggtggccgagcgcccgcgctgcccactcgctcgctcgcgcactcagacgcgcgccacaacagcgcgccccaagctgcgcagctctgcaaaagtttctgctcgggatctggctctcttccccttggactttagaacgatttagggttgacagaggaaagcagaggcgcgcaggaggagcagaaaacaccaccttctgcagttggaggcaggcagccccggctgcactctagccgccgcgcccggagccggggccgacccgccactatccgcagcagcctcggccaggaggcgacccgggcgcctgggtgtgtggctgctgttgcgggacgtcttcgcggggcgggaggctcgcgccgcagccagcgccatggccttgacctttgctttactggtggccctcctggtgctcagctgcaagtcaagctgctctgtgggctgtgatctgcctcaaacccacagcctgggtagcaggaggaccttgatgctcctggcacagatgaggagaatctctcttttctcctgcttgaaggacagacatgactttggatttccccaggaggagtttggcaaccagttccaaaaggctgaaaccatccctgtcctccatgagatgatccagcagatcttcaatctcttcagcacaaaggactcatctgctgcttgggatgagaccctcctagacaaattctacactgaactctaccagcagctgaatgacctggaagcctgtgtgatacagggggtgggggtgacagagactcccctgatgaaggaggactccattctggctgtgaggaaatacttccaaagaatcactctctatctgaaagagaagaaatacagcccttgtgcctgggaggttgtcagagcagaaatcatgagatctttttctttgtcaacaaacttgcaagaaagtttaagaagtaaggaaggatcaggcgagggaagaggctcgcttctgacttgcggcgatgtcgaggaaaacccgggacctaccaacaagtgtctcctccaaattgctctcctgttgtgcttctccactacagctctttccatgagctacaacttgcttggattcctacaaagaagcagcaattttcagtgtcagaagctcctgtggcaattgaatgggaggcttgaatactgcctcaaggacaggatgaactttgacatccctgaggagattaagcagctgcagcagttccagaaggaggacgccgcattgaccatctatgagatgctccagaacatctttgctattttcagacaagattcatctagcactggctggaatgagactattgttgagaacctcctggctaatgtctatcatcagataaaccatctgaagacagtcctggaagaaaaactggagaaagaagatttcaccaggggaaaactcatgagcagtctgcacctgaaaagatattatgggaggattctgcattacctgaaggccaaggagtacagtcactgtgcctggaccatagtcagagtggaaatcctaaggaacttttacttcattaacagacttacaggttacctccgaaactgaaaccggtatgttgctcggcaacggcctggtctgtgccaagtgtttgctgacgcaacccccactggctggggcttggccataggccatcagcgcatgcgtggaacctttgtggctcctctgccgatccatactgcggaactcctagccgcttgttttgctcgcagccggtctggggcaaagctcatcggaactgacaattctgtcgtcctctcgcggaaatatacatcgtttccatggctgctaggttgtactgccaactgcatccttcgcgggacgtcctttgtttacgtcccgtcggcgctgaatcccgcggacgacccctctcggggccgcttgggactctctcgtccccttctccgtctgccgttccagccgaccacggggcgcacctctctttacgcggtctccccgtctgtgccttctcatctgccggtccgtgtgcacttcgcttcacctctgcacgttgcatggagaccaccgtgaacgcccatcagatcctgcccaaggtcttacataagaggactcttggactcccagcaatgtcggcgcgccctggctagctggccagacatgataagatacattgatgagtttggacaaaccacaactagaatgcagtgaaaaaaatgctttatttgtgaaatttgtgatgctattgctttatttgtaaccattataagctgcaataaacaagttccctgacgggcttgtctgctcccggcatccgcttacagacaagctgtgaccgtctccgggagctgcatgtgtcagaggttttcaccgtcatcaccgaaacgcgcgagacgaaagggcctcgtgatacgcctatttttataggttaatgtcatgataataatggtttcttagacgtcaggtggcacttttcggggaaatgtgaagctttagaaaaactcatcgagcatcaaatgaaactgcaatttattcatatcaggattatcaataccatatttttgaaaaagccgtttctgtaatgaaggagaaaactcaccgaggcagttccataggatggcaagatcctggtatcggtctgcgattccgactcgtccaacatcaatacaacctattaatttcccctcgtcaaaaataaggttatcaagtgagaaatcaccatgagtgacgactgaatccggtgagaatggcaaaagtttatgcatttctttccagacttgttcaacaggccagccattacgctcgtcatcaaaatcactcgcatcaaccaaaccgttattcattcgtgattgcgcctgagcgagacgaaatacgcgatcgctgttaaaaggacaattacaaacaggaatcgaatgcaaccggcgcaggaacactgccagcgcatcaacaatattttcacctgaatcaggatattcttctaatacctggaatgctgtttttccggggatcgcagtggtgagtaaccatgcatcatcaggagtacggataaaatgcttgatggtcggaagaggcataaattccgtcagccagtttagtctgaccatctcatctgtaacatcattggcaacgctacctttgccatgtttcagaaacaactctggcgcatcgggcttcccatacaagcgatagattgtcgcacctgattgcccgacattatcgcgagcccatttatacccatataaatcagcatccatgttggaatttaatcgcggcctcgacgtttcccgttgaatatggctcataacaccccttgtattactgtttatgtaagcagacagttttattgttcatgatgatatatttttatcttgtgcaatgtaacatcagagattttgagacacgggccagagctgcaagcttctgtcagaccaagtttactcatatatactttagattgatttaaaacttcatttttaatttaaaaggatctaggtgaagatcctttatggtgaaggatgcgccacaggatactggcgcgcatacacagcacatctctttgcaggaaaaaaacgctatgaaaaatgttggttttatcggctggcgcggaatggtcggctctgttctcatgcaacgcatggtagaggagcgcgatttcgacgctattcgccctgttttcttttctacctcccagtttggacaggcggcgcccaccttcggcgacacctccaccggcacgctacaggacgcttttgatctggatgcgctaaaagcgctcgatatcatcgtgacctgccagggcggcgattataccaacgaaatttatccaaagctgcgcgaaagcggatggcagggttactggattgatgcggcttctacgctgcgcatgaaagatgatgccattattattctcgacccggtcaaccaggacgtgattaccgacggcct

SEQ ID NO: 542 - DNA, 6527 bp, synthetic construct
  misc_feature 1..6527: note = Synthetic DNA construct
  regulatory 1704..2007: note = enhancer - CMV; regulatory_class = enhancer
  regulatory 2008..2211: note = promoter - CMV promoter; regulatory_class = promoter
  regulatory 2299..2845: note = RBS - VCIP IRES; regulatory_class = ribosome_binding_site
  gene 2849..3406: note = huIFNb opt 33
  misc_feature 3407..3415: note = GSG linker opt 33
  gene 3416..3469: note = T2A opt 33
  gene 3470..4030: note = hIFNa2 NM_000605.4 opt 33
  misc_feature 4044..4577: note = HPRE
  regulatory 4586..4810: note = polyA_signal - bGH poly(A) signal; regulatory_class = polyA_signal_sequence
  misc_feature 4789..4868: note = Duplexed DNA insert
  source 1..6527: mol_type = other DNA
  rep_origin 822..1410
  regulatory 2197..2203: note = TATA signal; regulatory_class = TATA_box
  5'UTR 2212..2298
gaacaatggcgtgaagacctttgtgggcggtaactgtaccgttagcctgatgttgatgtcgctgggcggtctctttgcccataatctcgttgactgggtatccgtcgcgacctatcaggccgcctccggcggcggcgcgcgccatatgcgcgagctgttaacccagatgggtcagttgtatggccatgtcgccgatgaactggcgacgccgtcttccgcaattcttgatattgaacgcaaagttacggcattgacccgcagcggcgagctgccggttgataactttggcgtaccgctggcgggaagcctgatcccctggatcgacaaacagctcgataacggccagagccgcgaagagtggaaaggccaggcggaaaccaacaagattctcaatactgcctctgtgattccggttgatggtttgtgtgtgcgcgtcggcgcgctgcgctgtcacagccaggcgttcaccatcaagctgaaaaaagaggtatccattccgacggtggaagaactgctggcggcacataatccgtgggcgaaagtggtgccgaacgatcgtgatatcactatgcgcgaattaaccccggcggcggtgaccggcacgttgactacgccggttggtcgtctgcgtaagctgaacatggggccagagttcttgtcggcgtttaccgtaggcgaccagttgttatggggcgccgccgagccgctgcgtcgaatgctgcgccagttggcgtagttgataatctcatgaccaaaatcccttaacgtgagttttcgttccactgagcgtcagaccccgtagaaaagatcaaaggatcttcttgagatcctttttttctgcgcgtaatctgctgcttgcaaacaaaaaaaccaccgctaccagcggtggtttgtttgccggatcaagagctaccaactctttttccgaaggtaactggcttcagcagagcgcagataccaaatactgtccttctagtgtagccgtagttaggccaccacttcaagaactctgtagcaccgcctacatacctcgctctgctaatcctgttaccagtggctgctgccagtggcgataagtcgtgtcttaccgggttggactcaagacgatagttaccggataaggcgcagcggtcgggctgaacggggggttcgtgcacacagcccagcttggagcgaacgacctacaccgaactgagatacctacagcgtgagctatgagaaagcgccacgcttcccgaagggagaaaggcggacaggtatccggtaagcggcagggtcggaacaggagagcgcacgagggagcttccagggggaaacgcctggtatctttatagtcctgtcgggtttcgccacctctgacttgagcgtcgatttttgtgatgctcgtcaggggggcggagcctatggaaaaacgccagcaacgcggcctttttacggttcctggccttttgctggccttttgctcacatgttctttcctgcgttatcccctgattctgtggataaccgtattaccgcctttgagtgagctgataccgctcgccgcagccgaacgaccgagcgcagcgagtcagtgagcgaggaagcggtagagcgcccaatacgcaaaccgcctctccccgcgcgttggccgattcattaatgcagctggcacgacaggtttcccgactggaaagcgggcagtgagcgcaacgcaagtcgacccgttacataacttacggtaaatggcccgcctggctgaccgcccaacgacccccgcccattgacgtcaataatgacgtatgttcccatagtaacgccaatagggactttccattgacgtcaatgggtggagtatttacggtaaactgcccacttggcagtacatcaagtgtatcatatgccaagtacgccccctattgacgtcaatgacggtaaatggcccgcctggcattatgcccagtacatgaccttatgggactttcctacttggcagtacatctacgtattagtcatcgctattaccatggtgatgcggttttggcagtacatcaatgggcgtggatagcggtttgactcacggggatttccaagtctccaccccattgacgtcaatgggagtttgttttggcaccaaaatcaacgggactttccaaaatgtcgtaacaactccgccccattgacgcaaatgggcggtaggcgtgtacggtgggaggtctatataagcagagctggtttagtgaaccgtcagatccgctagcgattacgccaagctcgtctagacggcggccaagcttggcaatccggtactgttggtaaaagaaaacaaacccaggcgatcacagcagcagccgccgcggcagcagcaccaacagcaggaggagcaggaggagccggaggaggaggaggaggaggaggcaaagttagagttggggctggcgctccggagttgctgggctcagcgcagctcccattcattaaggaaccagctgcggaggaaggtggccgagcgcccgcgctgcccactcgctcgctcgcgcactcagacgcgcgccacaacagcgcgccccaagctgcgcagctctgcaaaagtttctgctcgggatctggctctcttccccttggactttagaacgatttagggttgacagaggaaagcagaggcgcgcaggaggagcagaaaacaccaccttctgcagttggaggcaggcagccccggctgcactctagccgccgcgcccggagccggggccgacccgccactatccgcagcagcctcggccaggaggcgacccgggcgcctgggtgtgtggctgctgttgcgggacgtcttcgcggggcgggaggctcgcgccgcagccagcgccatgaccaacaagtgtctccttcagattgcactgctgttgtgcttctccaccacagctctctccatgagctacaacctgcttggattcctgcaaagaagcagcaatttccagtgccagaagctcctgtggcaattgaatgggaggcttgagtactgcctcaaggaccggatgaacttcgacatccccgaggagattaagcagctgcagcagttccagaaggaggacgccgccctgaccatctacgagatgctgcagaacatcttcgccatcttcagacaggacagctccagcaccggctggaatgagactatcgtggagaacctgctggccaacgtgtaccatcagatcaaccacctgaagacagtgctggaggagaagctggagaaggaagacttcaccaggggcaaactgatgagctctctgcacctgaaaagatactacggcaggatcctgcactacctgaaggccaaggagtatagccactgtgcctggaccatagtgagagtggagatcctgaggaacttctacttcatcaacagactgaccggctacctgaggaacggctctggcgagggtagaggctcgttactgacatgcggcgatgtcgaggagaacccgggacctgccttgacctttgctttgctggtggccctcctggtgctcagctgcaagtcaagctgctctgtgggctgtgacctgcctcaaacccacagcctgggtagcaggaggaccctcatgctcctggctcagatgaggagaatctccctcttcagctgcctgaaggacagacacgacttcggatttccccaggaggagtttggcaaccagttccaaaaggctgagaccatccccgtgctgcatgagatgatccagcagatcttcaacctgtttagcacaaaggacagtagcgctgcttgggacgaaaccctgctggacaagttttacaccgagctgtaccagcagctgaacgacctggaggcctgcgtgattcagggcgtgggcgtgacagagacacccctgatgaaggaggacagcatcctggccgtgcgaaagtacttccagcgaatcaccctgtacctgaaggagaagaagtacagcccctgcgcctgggaggttgtgagagccgagatcatgaggagcttctctctgagcaccaacctgcaggagagcctgagaagcaaggagtgaaaccggtatgttgctcggcaacggcctggtctgtgccaagtgtttgctgacgcaacccccactggctggggcttggccataggccatcagcgcatgcgtggaacctttgtggctcctctgccgatccatactgcggaactcctagccgcttgttttgctcgcagccggtctggggcaaagctcatcggaactgacaattctgtcgtcctctcgcggaaatatacatcgtttccatggctgctaggttgtactgccaactgcatccttcgcgggacgtcctttgtttacgtcccgtcggcgctgaatcccgcggacgacccctctcggggccgcttgggactctctcgtccccttctccgtctgccgttccagccgaccacggggcgcacctctctttacgcggtctccccgtctgtgccttctcatctgccggtccgtgtgcacttcgcttcacctctgcacgttgcatggagaccaccgtgaacgcccatcagatcctgcccaaggtcttacataagaggactcttggactcccagcaatgtcggcgcgccctgtgccttctagttgccagccatctgttgtttgcccctcccccgtgccttccttgaccctggaaggtgccactcccactgtcctttcctaataaaatgaggaaattgcatcgcattgtctgagtaggtgtcattctattctggggggtggggtggggcaggacagcaagggggaggattgggaagacaatagcaggcatgctggggatgcggtgggctctatggggatccgctccggctcgagttaagccagccccgacacccgccaacacccgctgacgcgccctgacgggcttgtctgctcccggcatccgcttacagacaagctgtgaccgtctccgggagctgcatgtgtcagaggttttcaccgtcatcaccgaaacgcgcgagacgaaagggcctcgtgatacgcctatttttataggttaatgtcatgataataatggtttcttagacgtcaggtggcacttttcggggaaatgtgaagctttagaaaaactcatcgagcatcaaatgaaactgcaatttattcatatcaggattatcaataccatatttttgaaaaagccgtttctgtaatgaaggagaaaactcaccgaggcagttccataggatggcaagatcctggtatcggtctgcgattccgactcgtccaacatcaatacaacctattaatttcccctcgtcaaaaataaggttatcaagtgagaaatcaccatgagtgacgactgaatccggtgagaatggcaaaagtttatgcatttctttccagacttgttcaacaggccagccattacgctcgtcatcaaaatcactcgcatcaaccaaaccgttattcattcgtgattgcgcctgagcgagacgaaatacgcgatcgctgttaaaaggacaattacaaacaggaatcgaatgcaaccggcgcaggaacactgccagcgcatcaacaatattttcacctgaatcaggatattcttctaatacctggaatgctgtttttccggggatcgcagtggtgagtaaccatgcatcatcaggagtacggataaaatgcttgatggtcggaagaggcataaattccgtcagccagtttagtctgaccatctcatctgtaacatcattggcaacgctacctttgccatgtttcagaaacaactctggcgcatcgggcttcccatacaagcgatagattgtcgcacctgattgcccgacattatcgcgagcccatttatacccatataaatcagcatccatgttggaatttaatcgcggcctcgacgtttcccgttgaatatggctcataacaccccttgtattactgtttatgtaagcagacagttttattgttcatgatgatatatttttatcttgtgcaatgtaacatcagagattttgagacacgggccagagctgcaagcttctgtcagaccaagtttactcatatatactttagattgatttaaaacttcatttttaatttaaaaggatctaggtgaagatcctttatggtgaaggatgcgccacaggatactggcgcgcatacacagcacatctctttgcaggaaaaaaacgctatgaaaaatgttggttttatcggctggcgcggaatggtcggctctgttctcatgcaacgcatggtagaggagcgcgatttcgacgctattcgccctgttttcttttctacctcccagtttggacaggcggcgcccaccttcggcgacacctccaccggcacgctacaggacgcttttgatctggatgcgctaaaagcgctcgatatcatcgtgacctgccagggcggcgattataccaacgaaatttatccaaagctgcgcgaaagcggatggcagggttactggattgatgcggcttctacgctgcgcatgaaagatgatgccattattattctcgacccggtcaaccaggacgtgattaccgacggcct

SEQ ID NO: 543 - DNA, 6527 bp, synthetic construct
  misc_feature 1..6527: note = Synthetic DNA construct
  regulatory 1704..2007: note = enhancer - CMV; regulatory_class = enhancer
  regulatory 2008..2211: note = promoter - CMV promoter; regulatory_class = promoter
  regulatory 2299..2845: note = RBS - VCIP IRES; regulatory_class = ribosome_binding_site
  gene 2849..3406: note = huIFNb
  misc_feature 3407..3415: note = GGS Linker
  gene 3416..3469: note = T2A
  gene 3470..4030: note = hIFNa2 NM_000605.4
  misc_feature 4044..4577: note = HPRE
  regulatory 4586..4810: note = polyA_signal - bGH poly(A) signal; regulatory_class = polyA_signal_sequence
  misc_feature 4789..4868: note = Duplexed DNA insert
  source 1..6527: mol_type = other DNA
  regulatory 2197..2203: note = TATA sequence; regulatory_class = TATA_box
  rep_origin 822..1410
  5'UTR 2212..2298
gaacaatggcgtgaagacctttgtgggcggtaactgtaccgttagcctgatgttgatgtcgctgggcggtctctttgcccataatctcgttgactgggtatccgtcgcgacctatcaggccgcctccggcggcggcgcgcgccatatgcgcgagctgttaacccagatgggtcagttgtatggccatgtcgccgatgaactggcgacgccgtcttccgcaattcttgatattgaacgcaaagttacggcattgacccgcagcggcgagctgccggttgataactttggcgtaccgctggcgggaagcctgatcccctggatcgacaaacagctcgataacggccagagccgcgaagagtggaaaggccaggcggaaaccaacaagattctcaatactgcctctgtgattccggttgatggtttgtgtgtgcgcgtcggcgcgctgcgctgtcacagccaggcgttcaccatcaagctgaaaaaagaggtatccattccgacggtggaagaactgctggcggcacataatccgtgggcgaaagtggtgccgaacgatcgtgatatcactatgcgcgaattaaccccggcggcggtgaccggcacgttgactacgccggttggtcgtctgcgtaagctgaacatggggccagagttcttgtcggcgtttaccgtaggcgaccagttgttatggggcgccgccgagccgctgcgtcgaatgctgcgccagttggcgtagttgataatctcatgaccaaaatcccttaacgtgagttttcgttccactgagcgtcagaccccgtagaaaagatcaaaggatcttcttgagatcctttttttctgcgcgtaatctgctgcttgcaaacaaaaaaaccaccgctaccagcggtggtttgtttgccggatcaagagctaccaactctttttccgaaggtaactggcttcagcagagcgcagataccaaatactgtccttctagtgtagccgtagttaggccaccacttcaagaactctgtagcaccgcctacatacctcgctctgctaatcctgttaccagtggctgctgccagtggcgataagtcgtgtcttaccgggttggactcaagacgatagttaccggataaggcgcagcggtcgggctgaacggggggttcgtgcacacagcccagcttggagcgaacgacctacaccgaactgagatacctacagcgtgagctatgagaaagcgccacgcttcccgaagggagaaaggcggacaggtatccggtaagcggcagggtcggaacaggagagcgcacgagggagcttccagggggaaacgcctggtatctttatagtcctgtcgggtttcgccacctctgacttgagcgtcgatttttgtgatgctcgtcaggggggcggagcctatggaaaaacgccagcaacgcggcctttttacggttcctggccttttgctggccttttgctcacatgttctttcctgcgttatcccctgattctgtggataaccgtattaccgcctttgagtgagctgataccgctcgccgcagccgaacgaccgagcgcagcgagtcagtgagcgaggaagcggtagagcgcccaatacgcaaaccgcctctccccgcgcgttggccgattcattaatgcagctggcacgacaggtttcccgactggaaagcgggcagtgagcgcaacgcaagtcgacccgttacataacttacggtaaatggcccgcctggctgaccgcccaacgacccccgcccattgacgtcaataatgacgtatgttcccatagtaacgccaatagggactttccattgacgtcaatgggtggagtatttacggtaaactgcccacttggcagtacatcaagtgtatcatatgccaagtacgccccctattgacgtcaatgacggtaaatggcccgcctggcattatgcccagtacatgaccttatgggactttcctacttggcagtacatctacgtattagtcatcgctattaccatggtgatgcggttttggcagtacatcaatgggcgtggatagcggtttgactcacggggatttccaagtctccaccccattgacgtcaatgggagtttgttttggcaccaaaatcaacgggactttccaaaatgtcgtaacaactccgccccattgacgcaaatgggcggtaggcgtgtacggtgggaggtctatataagcagagctggtttagtgaaccgtcagatccgctagcgattacgccaagctcgtctagacggcggccaagcttggcaatccggtactgttggtaaaagaaaacaaacccaggcgatcacagcagcagccgccgcggcagcagcaccaacagcaggaggagcaggaggagccggaggaggaggaggaggaggaggcaaagttagagttggggctggcgctccggagttgctgggctcagcgcagctcccattcattaaggaaccagctgcggaggaaggtggccgagcgcccgcgctgcccactcgctcgctcgcgcactcagacgcgcgccacaacagcgcgccccaagctgcgcagctctgcaaaagtttctgctcgggatctggctctcttccccttggactttagaacgatttagggttgacagaggaaagcagaggcgcgcaggaggagcagaaaacaccaccttctgcagttggaggcaggcagccccggctgcactctagccgccgcgcccggagccggggccgacccgccactatccgcagcagcctcggccaggaggcgacccgggcgcctgggtgtgtggctgctgttgcgggacgtcttcgcggggcgggaggctcgcgccgcagccagcgccatgaccaacaagtgtctcctccaaattgctctcctgttgtgcttctccactacagctctttccatgagctacaacttgcttggattcctacaaagaagcagcaattttcagtgtcagaagctcctgtggcaattgaatgggaggcttgaatactgcctcaaggacaggatgaactttgacatccctgaggagattaagcagctgcagcagttccagaaggaggacgccgcattgaccatctatgagatgctccagaacatctttgctattttcagacaagattcatctagcactggctggaatgagactattgttgagaacctcctggctaatgtctatcatcagataaaccatctgaagacagtcctggaagaaaaactggagaaagaagatttcaccaggggaaaactcatgagcagtctgcacctgaaaagatattatgggaggattctgcattacctgaaggccaaggagtacagtcactgtgcctggaccatagtcagagtggaaatcctaaggaacttttacttcattaacagacttacaggttacctccgaaacggatcaggcgagggaagaggctcgcttctgacttgcggcgatgtcgaggaaaacccgggacctgccttgacctttgctttactggtggccctcctggtgctcagctgcaagtcaagctgctctgtgggctgtgatctgcctcaaacccacagcctgggtagcaggaggaccttgatgctcctggcacagatgaggagaatctctcttttctcctgcttgaaggacagacatgactttggatttccccaggaggagtttggcaaccagttccaaaaggctgaaaccatccctgtcctccatgagatgatccagcagatcttcaatctcttcagcacaaaggactcatctgctgcttgggatgagaccctcctagacaaattctacactgaactctaccagcagctgaatgacctggaagcctgtgtgatacagggggtgggggtgacagagactcccctgatgaaggaggactccattctggctgtgaggaaatacttccaaagaatcactctctatctgaaagagaagaaatacagcccttgtgcctgggaggttgtcagagcagaaatcatgagatctttttctttgtcaacaaacttgcaagaaagtttaagaagtaaggaatgaaaccggtatgttgctcggcaacggcctggtctgtgccaagtgtttgctgacgcaacccccactggctggggcttggccataggccatcagcgcatgcgtggaacctttgtggctcctctgccgatccatactgcggaactcctagccgcttgttttgctcgcagccggtctggggcaaagctcatcggaactgacaattctgtcgtcctctcgcggaaatatacatcgtttccatggctgctaggttgtactgccaactgcatccttcgcgggacgtcctttgtttacgtcccgtcggcgctgaatcccgcggacgacccctctcggggccgcttgggactctctcgtccccttctccgtctgccgttccagccgaccacggggcgcacctctctttacgcggtctccccgtctgtgccttctcatctgccggtccgtgtgcacttcgcttcacctctgcacgttgcatggagaccaccgtgaacgcccatcagatcctgcccaaggtcttacataagaggactcttggactcccagcaatgtcggcgcgccctgtgccttctagttgccagccatctgttgtttgcccctcccccgtgccttccttgaccctggaaggtgccactcccactgtcctttcctaataaaatgaggaaattgcatcgcattgtctgagtaggtgtcattctattctggggggtggggtggggcaggacagcaagggggaggattgggaagacaatagcaggcatgctggggatgcggtgggctctatggggatccgctccggctcgagttaagccagccccgacacccgccaacacccgctgacgcgccctgacgggcttgtctgctcccggcatccgcttacagacaagctgtgaccgtctccgggagctgcatgtgtcagaggttttcaccgtcatcaccgaaacgcgcgagacgaaagggcctcgtgatacgcctatttttataggttaatgtcatgataataatggtttcttagacgtcaggtggcacttttcggggaaatgtgaagctttagaaaaactcatcgagcatcaaatgaaactgcaatttattcatatcaggattatcaataccatatttttgaaaaagccgtttctgtaatgaaggagaaaactcaccgaggcagttccataggatggcaagatcctggtatcggtctgcgattccgactcgtccaacatcaatacaacctattaatttcccctcgtcaaaaataaggttatcaagtgagaaatcaccatgagtgacgactgaatccggtgagaatggcaaaagtttatgcatttctttccagacttgttcaacaggccagccattacgctcgtcatcaaaatcactcgcatcaaccaaaccgttattcattcgtgattgcgcctgagcgagacgaaatacgcgatcgctgttaaaaggacaattacaaacaggaatcgaatgcaaccggcgcaggaacactgccagcgcatcaacaatattttcacctgaatcaggatattcttctaatacctggaatgctgtttttccggggatcgcagtggtgagtaaccatgcatcatcaggagtacggataaaatgcttgatggtcggaagaggcataaattccgtcagccagtttagtctgaccatctcatctgtaacatcattggcaacgctacctttgccatgtttcagaaacaactctggcgcatcgggcttcccatacaagcgatagattgtcgcacctgattgcccgacattatcgcgagcccatttatacccatataaatcagcatccatgttggaatttaatcgcggcctcgacgtttcccgttgaatatggctcataacaccccttgtattactgtttatgtaagcagacagttttattgttcatgatgatatatttttatcttgtgcaatgtaacatcagagattttgagacacgggccagagctgcaagcttctgtcagaccaagtttactcatatatactttagattgatttaaaacttcatttttaatttaaaaggatctaggtgaagatcctttatggtgaaggatgcgccacaggatactggcgcgcatacacagcacatctctttgcaggaaaaaaacgctatgaaaaatgttggttttatcggctggcgcggaatggtcggctctgttctcatgcaacgcatggtagaggagcgcgatttcgacgctattcgccctgttttcttttctacctcccagtttggacaggcggcgcccaccttcggcgacacctccaccggcacgctacaggacgcttttgatctggatgcgctaaaagcgctcgatatcatcgtgacctgccagggcggcgattataccaacgaaatttatccaaagctgcgcgaaagcggatggcagggttactggattgatgcggcttctacgctgcgcatgaaagatgatgccattattattctcgacccggtcaaccaggacgtgattaccgacggcct

SEQ ID NO: 544 - DNA, 6388 bp, synthetic construct
  misc_feature 1..6388: note = Synthetic DNA construct
  regulatory 1704..2007: note = enhancer - CMV; regulatory_class = enhancer
  regulatory 2008..2211: note = promoter - CMV promoter; regulatory_class = promoter
  regulatory 2299..2845: note = RBS - VCIP IRES; regulatory_class = ribosome_binding_site
  gene 2849..3406: note = huIFNb opt 33
  misc_feature 3407..3415: note = GSG linker opt 33
  gene 3416..3469: note = T2A opt 33
  gene 3470..4030: note = hIFNa2 NM_000605.4 opt 33
  misc_feature 4044..4577: note = HPRE
  regulatory 4608..4729: note = polyA_signal - SV40 poly(A) signal; regulatory_class = polyA_signal_sequence
  source 1..6388: mol_type = other DNA
  regulatory 2197..2203: note = TATA signal; regulatory_class = TATA_box
  rep_origin 822..1410
  5'UTR 2212..2298
gaacaatggcgtgaagacctttgtgggcggtaactgtaccgttagcctgatgttgatgtcgctgggcggtctctttgcccataatctcgttgactgggtatccgtcgcgacctatcaggccgcctccggcggcggcgcgcgccatatgcgcgagctgttaacccagatgggtcagttgtatggccatgtcgccgatgaactggcgacgccgtcttccgcaattcttgatattgaacgcaaagttacggcattgacccgcagcggcgagctgccggttgataactttggcgtaccgctggcgggaagcctgatcccctggatcgacaaacagctcgataacggccagagccgcgaagagtggaaaggccaggcggaaaccaacaagattctcaatactgcctctgtgattccggttgatggtttgtgtgtgcgcgtcggcgcgctgcgctgtcacagccaggcgttcaccatcaagctgaaaaaagaggtatccattccgacggtggaagaactgctggcggcacataatccgtgggcgaaagtggtgccgaacgatcgtgatatcactatgcgcgaattaaccccggcggcggtgaccggcacgttgactacgccggttggtcgtctgcgtaagctgaacatggggccagagttcttgtcggcgtttaccgtaggcgaccagttgttatggggcgccgccgagccgctgcgtcgaatgctgcgccagttggcgtagttgataatctcatgaccaaaatcccttaacgtgagttttcgttccactgagcgtcagaccccgtagaaaagatcaaaggatcttcttgagatcctttttttctgcgcgtaatctgctgcttgcaaacaaaaaaaccaccgctaccagcggtggtttgtttgccggatcaagagctaccaactctttttccgaaggtaactggcttcagcagagcgcagataccaaatactgtccttctagtgtagccgtagttaggccaccacttcaagaactctgtagcaccgcctacatacctcgctctgctaatcctgttaccagtggctgctgccagtggcgataagtcgtgtcttaccgggttggactcaagacgatagttaccggataaggcgcagcggtcgggctgaacggggggttcgtgcacacagcccagcttggagcgaacgacctacaccgaactgagatacctacagcgtgagctatgagaaagcgccacgcttcccgaagggagaaaggcggacaggtatccggtaagcggcagggtcggaacaggagagcgcacgagggagcttccagggggaaacgcctggtatctttatagtcctgtcgggtttcgccacctctgacttgagcgtcgatttttgtgatgctcgtcaggggggcggagcctatggaaaaacgccagcaacgcggcctttttacggttcctggccttttgctggccttttgctcacatgttctttcctgcgttatcccctgattctgtggataaccgtattaccgcctttgagtgagctgataccgctcgccgcagccgaacgaccgagcgcagcgagtcagtgagcgaggaagcggtagagcgcccaatacgcaaaccgcctctccccgcgcgttggccgattcattaatgcagctggcacgacaggtttcccgactggaaagcgggcagtgagcgcaacgcaagtcgacccgttacataacttacggtaaatggcccgcctggctgaccgcccaacgacccccgcccattgacgtcaataatgacgtatgttcccatagtaacgccaatagggactttccattgacgtcaatgggtggagtatttacggtaaactgcccacttggcagtacatcaagtgtatcatatgccaagtacgccccctattgacgtcaatgacggtaaatggcccgcctggcattatgcccagtacatgaccttatgggactttcctacttggcagtacatctacgtattagtcatcgctattaccatggtgatgcggttttggcagtacatcaatgggcgtggatagcggtttgactcacggggatttccaagtctccaccccattgacgtcaatgggagtttgttttggcaccaaaatcaacgggactttccaaaatgtcgtaacaactccgccccattgacgcaaatgggcggtaggcgtgtacggtgggaggtctatataagcagagctggtttagtgaaccgtcagatccgctagcgattacgccaagctcgtctagacggcggccaagcttggcaatccggtactgttggtaaaagaaaacaaacccaggcgatcacagcagcagccgccgcggcagcagcaccaacagcaggaggagcaggaggagccggaggaggaggaggaggaggaggcaaagttagagttggggctggcgctccggagttgctgggctcagcgcagctcccattcattaaggaaccagctgcggaggaaggtggccgagcgcccgcgctgcccactcgctcgctcgcgcactcagacgcgcgccacaacagcgcgccccaagctgcgcagctctgcaaaagtttctgctcgggatctggctctcttccccttggactttagaacgatttagggttgacagaggaaagcagaggcgcgcaggaggagcagaaaacaccaccttctgcagttggaggcaggcagccccggctgcactctagccgccgcgcccggagccggggccgacccgccactatccgcagcagcctcggccaggaggcgacccgggcgcctgggtgtgtggctgctgttgcgggacgtcttcgcggggcgggaggctcgcgccgcagccagcgccatgaccaacaagtgtctccttcagattgcactgctgttgtgcttctccaccacagctctctccatgagctacaacctgcttggattcctgcaaagaagcagcaatttccagtgccagaagctcctgtggcaattgaatgggaggcttgagtactgcctcaaggaccggatgaacttcgacatccccgaggagattaagcagctgcagcagttccagaaggaggacgccgccctgaccatctacgagatgctgcagaacatcttcgccatcttcagacaggacagctccagcaccggctggaatgagactatcgtggagaacctgctggccaacgtgtaccatcagatcaaccacctgaagacagtgctggaggagaagctggagaaggaagacttcaccaggggcaaactgatgagctctctgcacctgaaaagatactacggcaggatcctgcactacctgaaggccaaggagtatagccactgtgcctggaccatagtgagagtggagatcctgaggaacttctacttcatcaacagactgaccggctacctgaggaacggctctggcgagggtagaggctcgttactgacatgcggcgatgtcgaggagaacccgggacctgccttgacctttgctttgctggtggccctcctggtgctcagctgcaagtcaagctgctctgtgggctgtgacctgcctcaaacccacagcctgggtagcaggaggaccctcatgctcctggctcagatgaggagaatctccctcttcagctgcctgaaggacagacacgacttcggatttccccaggaggagtttggcaaccagttccaaaaggctgagaccatccccgtgctgcatgagatgatccagcagatcttcaacctgtttagcacaaaggacagtagcgctgcttgggacgaaaccctgctggacaagttttacaccgagctgtaccagcagctgaacgacctggaggcctgcgtgattcagggcgtgggcgtgacagagacacccctgatgaaggaggacagcatcctggccgtgcgaaagtacttccagcgaatcaccctgtacctgaaggagaagaagtacagcccctgcgcctgggaggttgtgagagccgagatcatgaggagcttctctctgagcaccaacctgcaggagagcctgagaagcaaggagtgaaaccggtatgttgctcggcaacggcctggtctgtgccaagtgtttgctgacgcaacccccactggctggggcttggccataggccatcagcgcatgcgtggaacctttgtggctcctctgccgatccatactgcggaactcctagccgcttgttttgctcgcagccggtctggggcaaagctcatcggaactgacaattctgtcgtcctctcgcggaaatatacatcgtttccatggctgctaggttgtactgccaactgcatccttcgcgggacgtcctttgtttacgtcccgtcggcgctgaatcccgcggacgacccctctcggggccgcttgggactctctcgtccccttctccgtctgccgttccagccgaccacggggcgcacctctctttacgcggtctccccgtctgtgccttctcatctgccggtccgtgtgcacttcgcttcacctctgcacgttgcatggagaccaccgtgaacgcccatcagatcctgcccaaggtcttacataagaggactcttggactcccagcaatgtcggcgcgccctggctagctggccagacatgataagatacattgatgagtttggacaaaccacaactagaatgcagtgaaaaaaatgctttatttgtgaaatttgtgatgctattgctttatttgtaaccattataagctgcaataaacaagttccctgacgggcttgtctgctcccggcatccgcttacagacaagctgtgaccgtctccgggagctgcatgtgtcagaggttttcaccgtcatcaccgaaacgcgcgagacgaaagggcctcgtgatacgcctatttttataggttaatgtcatgataataatggtttcttagacgtcaggtggcacttttcggggaaatgtgaagctttagaaaaactcatcgagcatcaaatgaaactgcaatttattcatatcaggattatcaataccatatttttgaaaaagccgtttctgtaatgaaggagaaaactcaccgaggcagttccataggatggcaagatcctggtatcggtctgcgattccgactcgtccaacatcaatacaacctattaatttcccctcgtcaaaaataaggttatcaagtgagaaatcaccatgagtgacgactgaatccggtgagaatggcaaaagtttatgcatttctttccagacttgttcaacaggccagccattacgctcgtcatcaaaatcactcgcatcaaccaaaccgttattcattcgtgattgcgcctgagcgagacgaaatacgcgatcgctgttaaaaggacaattacaaacaggaatcgaatgcaaccggcgcaggaacactgccagcgcatcaacaatattttcacctgaatcaggatattcttctaatacctggaatgctgtttttccggggatcgcagtggtgagtaaccatgcatcatcaggagtacggataaaatgcttgatggtcggaagaggcataaattccgtcagccagtttagtctgaccatctcatctgtaacatcattggcaacgctacctttgccatgtttcagaaacaactctggcgcatcgggcttcccatacaagcgatagattgtcgcacctgattgcccgacattatcgcgagcccatttatacccatataaatcagcatccatgttggaatttaatcgcggcctcgacgtttcccgttgaatatggctcataacaccccttgtattactgtttatgtaagcagacagttttattgttcatgatgatatatttttatcttgtgcaatgtaacatcagagattttgagacacgggccagagctgcaagcttctgtcagaccaagtttactcatatatactttagattgatttaaaacttcatttttaatttaaaaggatctaggtgaagatcctttatggtgaaggatgcgccacaggatactggcgcgcatacacagcacatctctttgcaggaaaaaaacgctatgaaaaatgttggttttatcggctggcgcggaatggtcggctctgttctcatgcaacgcatggtagaggagcgcgatttcgacgctattcgccctgttttcttttctacctcccagtttggacaggcggcgcccaccttcggcgacacctccaccggcacgctacaggacgcttttgatctggatgcgctaaaagcgctcgatatcatcgtgacctgccagggcggcgattataccaacgaaatttatccaaagctgcgcgaaagcggatggcagggttactggattgatgcggcttctacgctgcgcatgaaagatgatgccattattattctcgacccggtcaaccaggacgtgattaccgacggcct

SEQ ID NO: 545 - DNA, 6388 bp, synthetic construct
  misc_feature 1..6388: note = Synthetic DNA construct
  regulatory 1704..2007: note = enhancer - CMV; regulatory_class = enhancer
  regulatory 2008..2211: note = promoter - CMV promoter; regulatory_class = promoter
  regulatory 2299..2845: note = RBS - VCIP IRES; regulatory_class = ribosome_binding_site
  gene 2849..3406: note = huIFNb
  misc_feature 3407..3415: note = GGS Linker
  gene 3416..3469: note = T2A
  gene 3470..4030: note = hIFNa2 NM_000605.4
  misc_feature 4044..4577: note = HPRE
  regulatory 4608..4729: note = polyA_signal - SV40 poly(A) signal; regulatory_class = polyA_signal_sequence
  source 1..6388: mol_type = other DNA
  regulatory 2197..2203: note = TATA signal; regulatory_class = TATA_box
  rep_origin 822..1410
  5'UTR 2212..2298
gaacaatggcgtgaagacctttgtgggcggtaactgtaccgttagcctgatgttgatgtcgctgggcggtctctttgcccataatctcgttgactgggtatccgtcgcgacctatcaggccgcctccggcggcggcgcgcgccatatgcgcgagctgttaacccagatgggtcagttgtatggccatgtcgccgatgaactggcgacgccgtcttccgcaattcttgatattgaacgcaaagttacggcattgacccgcagcggcgagctgccggttgataactttggcgtaccgctggcgggaagcctgatcccctggatcgacaaacagctcgataacggccagagccgcgaagagtggaaaggccaggcggaaaccaacaagattctcaatactgcctctgtgattccggttgatggtttgtgtgtgcgcgtcggcgcgctgcgctgtcacagccaggcgttcaccatcaagctgaaaaaagaggtatccattccgacggtggaagaactgctggcggcacataatccgtgggcgaaagtggtgccgaacgatcgtgatatcactatgcgcgaattaaccccggcggcggtgaccggcacgttgactacgccggttggtcgtctgcgtaagctgaacatggggccagagttcttgtcggcgtttaccgtaggcgaccagttgttatggggcgccgccgagccgctgcgtcgaatgctgcgccagttggcgtagttgataatctcatgaccaaaatcccttaacgtgagttttcgttccactgagcgtcagaccccgtagaaaagatcaaaggatcttcttgagatcctttttttctgcgcgtaatctgctgcttgcaaacaaaaaaaccaccgctaccagcggtggtttgtttgccggatcaagagctaccaactctttttccgaaggtaactggcttcagcagagcgcagataccaaatactgtccttctagtgtagccgtagttaggccaccacttcaagaactctgtagcaccgcctacatacctcgctctgctaatcctgttaccagtggctgctgccagtggcgataagtcgtgtcttaccgggttggactcaagacgatagttaccggataaggcgcagcggtcgggctgaacggggggttcgtgcacacagcccagcttggagcgaacgacctacaccgaactgagatacctacagcgtgagctatgagaaagcgccacgcttcccgaagggagaaaggcggacaggtatccggtaagcggcagggtcggaacaggagagcgcacgagggagcttccagggggaaacgcctggtatctttatagtcctgtcgggtttcgccacctctgacttgagcgtcgatttttgtgatgctcgtcaggggggcggagcctatggaaaaacgccagcaacgcggcctttttacggttcctggccttttgctggccttttgctcacatgttctttcctgcgttatcccctgattctgtggataaccgtattaccgcctttgagtgagctgataccgctcgccgcagccgaacgaccgagcgcagcgagtcagtgagcgaggaagcggtagagcgcccaatacgcaaaccgcctctccccgcgcgttggccgattcattaatgcagctggcacgacaggtttcccgactggaaagcgggcagtgagcgcaacgcaagtcgacccgttacataacttacggtaaatggcccgcctggctgaccgcccaacgacccccgcccattgacgtcaataatgacgtatgttcccatagtaacgccaatagggactttccattgacgtcaatgggtggagtatttacggtaaactgcccacttggcagtacatcaagtgtatcatatgccaagtacgccccctattgacgtcaatgacggtaaatggcccgcctggcattatgcccagtacatgaccttatgggactttcctacttggcagtacatctacgtattagtcatcgctattaccatggtgatgcggttttggcagtacatcaatgggcgtggatagcggtttgactcacggggatttccaagtctccaccccattgacgtcaatgggagtttgttttggcaccaaaatcaacgggactttccaaaatgtcgtaacaactccgccccattgacgcaaatgggcggtaggcgtgtacggtgggaggtctatataagcagagctggtttagtgaaccgtcagatccgctagcgattacgccaagctcgtctagacggcggccaagcttggcaatccggtactgttggtaaaagaaaacaaacccaggcgatcacagcagcagccgccgcggcagcagcaccaacagcaggaggagcaggaggagccggaggaggaggaggaggaggaggcaaagttagagttggggctggcgctccggagttgctgggctcagcgcagctcccattcattaaggaaccagctgcggaggaaggtggccgagcgcccgcgctgcccactcgctcgctcgcgcactcagacgcgcgccacaacagcgcgccccaagctgcgcagctctgcaaaagtttctgctcgggatctggctctcttccccttggactttagaacgatttagggttgacagaggaaagcagaggcgcgcaggaggagcagaaaacaccaccttctgcagttggaggcaggcagccccggctgcactctagccgccgcgcccggagccggggccgacccgccactatccgcagcagcctcggccaggaggcgacccgggcgcctgggtgtgtggctgctgttgcgggacgtcttcgcggggcgggaggctcgcgccgcagccagcgccatgaccaacaagtgtctcctccaaattgctctcctgttgtgcttctccactacagctctttccatgagctacaacttgcttggattcctacaaagaagcagcaattttcagtgtcagaagctcctgtggcaattgaatgggaggcttgaatactgcctcaaggacaggatgaactttgacatccctgaggagattaagcagctgcagcagttccagaaggaggacgccgcattgaccatctatgagatgctccagaacatctttgctattttcagacaagattcatctagcactggctggaatgagactattgttgagaacctcctggctaatgtctatcatcagataaaccatctgaagacagtcctggaagaaaaactggagaaagaagatttcaccaggggaaaactcatgagcagtctgcacctgaaaagatattatgggaggattctgcattacctgaaggccaaggagtacagtcactgtgcctggaccatagtcagagtggaaatcctaaggaacttttacttcattaacagacttacaggttacctccgaaacggatcaggcgagggaagaggctcgcttctgacttgcggcgatgtcgaggaaaacccgggacctgccttgacctttgctttactggtggccctcctggtgctcagctgcaagtcaagctgctctgtgggctgtgatctgcctcaaacccacagcctgggtagcaggaggaccttgatgctcctggcacagatgaggagaatctctcttttctcctgcttgaaggacagacatgactttggatttccccaggaggagtttggcaaccagttccaaaaggctgaaaccatccctgtcctccatgagatgatccagcagatcttcaatctcttcagcacaaaggactcatctgctgcttgggatgagaccctcctagacaaattctacactgaactctaccagcagctgaatgacctggaagcctgtgtgatacagggggtgggggtgacagagactcccctgatgaaggaggactccattctggctgtgaggaaatacttccaaagaatcactctctatctgaaagagaagaaatacagcccttgtgcctgggaggttgtcagagcagaaatcatgagatctttttctttgtcaacaaacttgcaagaaagtttaagaagtaaggaatgaaaccggtatgttgctcggcaacggcctggtctgtgccaagtgtttgctgacgcaacccccactggctggggcttggccataggccatcagcgcatgcgtggaacctttgtggctcctctgccgatccatactgcggaactcctagccgcttgttttgctcgcagccggtctggggcaaagctcatcggaactgacaattctgtcgtcctctcgcggaaatatacatcgtttccatggctgctaggttgtactgccaactgcatccttcgcgggacgtcctttgtttacgtcccgtcggcgctgaatcccgcggacgacccctctcggggccgcttgggactctctcgtccccttctccgtctgccgttccagccgaccacggggcgcacctctctttacgcggtctccccgtctgtgccttctcatctgccggtccgtgtgcacttcgcttcacctctgcacgttgcatggagaccaccgtgaacgcccatcagatcctgcccaaggtcttacataagaggactcttggactcccagcaatgtcggcgcgccctggctagctggccagacatgataagatacattgatgagtttggacaaaccacaactagaatgcagtgaaaaaaatgctttatttgtgaaatttgtgatgctattgctttatttgtaaccattataagctgcaataaacaagttccctgacgggcttgtctgctcccggcatccgcttacagacaagctgtgaccgtctccgggagctgcatgtgtcagaggttttcaccgtcatcaccgaaacgcgcgagacgaaagggcctcgtgatacgcctatttttataggttaatgtcatgataataatggtttcttagacgtcaggtggcacttttcggggaaatgtgaagctttagaaaaactcatcgagcatcaaatgaaactgcaatttattcatatcaggattatcaataccatatttttgaaaaagccgtttctgtaatgaaggagaaaactcaccgaggcagttccataggatggcaagatcctggtatcggtctgcgattccgactcgtccaacatcaatacaacctattaatttcccctcgtcaaaaataaggttatcaagtgagaaatcaccatgagtgacgactgaatccggtgagaatggcaaaagtttatgcatttctttccagacttgttcaacaggccagccattacgctcgtcatcaaaatcactcgcatcaaccaaaccgttattcattcgtgattgcgcctgagcgagacgaaatacgcgatcgctgttaaaaggacaattacaaacaggaatcgaatgcaaccggcgcaggaacactgccagcgcatcaacaatattttcacctgaatcaggatattcttctaatacctggaatgctgtttttccggggatcgcagtggtgagtaaccatgcatcatcaggagtacggataaaatgcttgatggtcggaagaggcataaattccgtcagccagtttagtctgaccatctcatctgtaacatcattggcaacgctacctttgccatgtttcagaaacaactctggcgcatcgggcttcccatacaagcgatagattgtcgcacctgattgcccgacattatcgcgagcccatttatacccatataaatcagcatccatgttggaatttaatcgcggcctcgacgtttcccgttgaatatggctcataacaccccttgtattactgtttatgtaagcagacagttttattgttcatgatgatatatttttatcttgtgcaatgtaacatcagagattttgagacacgggccagagctgcaagcttctgtcagaccaagtttactcatatatactttagattgatttaaaacttcatttttaatttaaaaggatctaggtgaagatcctttatggtgaaggatgcgccacaggatactggcgcgcatacacagcacatctctttgcaggaaaaaaacgctatgaaaaatgttggttttatcggctggcgcggaatggtcggctctgttctcatgcaacgcatggtagaggagcgcgatttcgacgctattcgccctgttttcttttctacctcccagtttggacaggcggcgcccaccttcggcgacacctccaccggcacgctacaggacgcttttgatctggatgcgctaaaagcgctcgatatcatcgtgacctgccagggcggcgattataccaacgaaatttatccaaagctgcgcgaaagcggatggcagggttactggattgatgcggcttctacgctgcgcatgaaagatgatgccattattattctcgacccggtcaaccaggacgtgattaccgacggcct

SEQ ID NO: 546 - DNA, 1137 bp, synthetic construct
  misc_feature 1..1137: note = Human STING N154S/R284G Tasmanian devil CTT
  source 1..1137: mol_type = other DNA
ccccactccagcctgcatccatccatcccgtgtcccaggggtcacggggcccagaaggcagccttggttctgctgagtgcctgcctggtgaccctttgggggctaggagagccaccagagcacactctccggtacctggtcctccacctagcctccctgcagctgggactgctgttaaacggggtctgcagcctggctgaggagctgcgccacatccactccaggtaccggggcagctactggaggactgtgcgggcctgcctgggctgccccctccgccgtggggccctgttgctgctgtccatctatttctactactccctcccaaatgcggtcggcccgcccttcacttggatgcttgccctcctgggcctctcgcaggcactgaacatcctcctgggcctcaagggcctggccccagctgagatctctgcagtgtgtgaaaaagggaatttcagcgtggcccatgggctggcatggtcatattacatcggatatctgcggctgatcctgccagagctccaggcccggattcgaacttacaatcagcattacaacaacctgctacggggtgcagtgagccagcggctgtatattctcctcccattggactgtggggtgcctgataacctgagtatggctgaccccaacattcgcttcctggataaactgccccagcagaccggtgaccgtgctggcatcaaggatcgggtttacagcaacagcatctatgagcttctggagaacgggcagcgggcgggcacctgtgtcctggagtacgccacccccttgcagactttgtttgccatgtcacaatacagtcaagctggctttagccgggaggatggccttgagcaggccaaactcttctgccggacacttgaggacatcctggcagatgcccctgagtctcagaacaactgccgcctcattgcctaccaggaacctgcagatgacagcagcttctcgctgtcccaggaggttctccggcacctgcggcaggagaggcaagaggaatttgccatcggccccaaaagagcgatgacagtgactacttcctccactctcagccaggagccccagttgctcattagcgggatggagcaaccgctttctctgcgcacagacgggttctga

SEQ ID NO: 547 - DNA, 729 bp, synthetic construct
  misc_feature 1..729: note = human IL-15 complex
  source 1..729: mol_type = other DNA
atggccccgcggcgggcgcgcggctgccggaccctcggtctcccggcgctgctactgctgctgctgctccggccgccggcgacgcggggcatcacgtgccctccccccatgtccgtggaacacgcagacatctgggtcaagagctacagcttgtactccagggagcggtacatttgtaactctggtttcaagcgtaaagccggcacgtccagcctgacggagtgcgtgttgaacaaggccacgaatgtcgcccactggacaacccccagtctcaaatgcattagagaccctgccctggttcaccaaaggccagcgccaccctccggtggcggtggctcgggcggtggtgggtcgggtggcggcggatctggtggcggtggctcggccaactgggtgaatgtaataagtgatttgaaaaaaattgaagatcttattcaatctatgcatattgatgctactttatatacggaaagtgatgttcaccccagttgcaaagtaacagcaatgaagtgctttctcttggagttacaagttatttcacttgagtccggagatgcaagtattcatgatacagtagaaaatctgatcatcctagcaaacaacagtttgtcttctaatgggaatgtaacagaatctggatgcaaagaatgtgaggaactggaggaaaaaaatattaaagaatttttgcagagttttgtacatattgtccaaatgttcatcaacacttct

SEQ ID NO: 548 - protein, 243 aa, synthetic construct; identical to SEQ ID NO: 404
  REGION 1..243: note = human IL-15 complex

SEQ ID NO: 549 - DNA, 561 bp, synthetic construct
  misc_feature 1..561: note = human IFNa2
  source 1..561: mol_type = other DNA
gccttgacctttgctttactggtggccctcctggtgctcagctgcaagtcaagctgctctgtgggctgtgatctgcctcaaacccacagcctgggtagcaggaggaccttgatgctcctggcacagatgaggagaatctctcttttctcctgcttgaaggacagacatgactttggatttccccaggaggagtttggcaaccagttccaaaaggctgaaaccatccctgtcctccatgagatgatccagcagatcttcaatctcttcagcacaaaggactcatctgctgcttgggatgagaccctcctagacaaattctacactgaactctaccagcagctgaatgacctggaagcctgtgtgatacagggggtgggggtgacagagactcccctgatgaaggaggactccattctggctgtgaggaaatacttccaaagaatcactctctatctgaaagagaagaaatacagcccttgtgcctgggaggttgtcagagcagaaatcatgagatctttttctttgtcaacaaacttgcaagaaagtttaagaagtaaggaa

SEQ ID NO: 550 - protein, 187 aa, synthetic construct
  REGION 1..187: note = human IFNa2
ALTFALLVALLVLSCKSSCSVGCDLPQTHSLGSRRTLMLLAQMRRISLFSCLKDRHDFGFPQEEFGNQFQKAETIPVLHEMIQQIFNLFSTKDSSAAWDETLLDKFYTELYQQLNDLEACVIQGVGVTETPLMKEDSILAVRKYFQRITLYLKEKKYSPCAWEVVRAEIMRSFSLSTNLQESLRSKE

SEQ ID NO: 551 - DNA, 558 bp, synthetic construct
  misc_feature 1..558: note = human IFNb
  source 1..558: mol_type = other DNA
accaacaagtgtctcctccaaattgctctcctgttgtgcttctccactacagctctttccatgagctacaacttgcttggattcctacaaagaagcagcaattttcagtgtcagaagctcctgtggcaattgaatgggaggcttgaatactgcctcaaggacaggatgaactttgacatccctgaggagattaagcagctgcagcagttccagaaggaggacgccgcattgaccatctatgagatgctccagaacatctttgctattttcagacaagattcatctagcactggctggaatgagactattgttgagaacctcctggctaatgtctatcatcagataaaccatctgaagacagtcctggaagaaaaactggagaaagaagatttcaccaggggaaaactcatgagcagtctgcacctgaaaagatattatgggaggattctgcattacctgaaggccaaggagtacagtcactgtgcctggaccatagtcagagtggaaatcctaaggaacttttacttcattaacagacttacaggttacctccgaaac

SEQ ID NO: 552 - protein, 186 aa, synthetic construct
  REGION 1..186: note = human IFNb
TNKCLLQIALLLCFSTTALSMSYNLLGFLQRSSNFQCQKLLWQLNGRLEYCLKDRMNFDIPEEIKQLQQFQKEDAALTIYEMLQNIFAIFRQDSSSTGWNETIVENLLANVYHQINHLKTVLEEKLEKEDFTRGKLMSSLHLKRYYGRILHYLKAKEYSHCAWTIVRVEILRNFYFINRLTGYLRN

SEQ ID NO: 553 - DNA, 499 bp, synthetic construct
  misc_feature 1..499: note = Cap Independent Translation Enhancer (CITE) fromthe encephalomyocarditis virus 5' non-codingregion
  source 1..499: mol_type = other DNA
gttattttccaccatattgccgtcttttggcaatgtgagggcccggaaacctggccctgtcttcttgacgagcattcctaggggtctttcccctctcgccaaaggaatgcaaggtctgttgaatgtcgtgaaggaagcagttcctctggaagcttcttgaagacaaacaacgtctgtagcgaccctttgcaggcagcggaaccccccacctggcgacaggtgcctctgcggccaaaagccacgtgtataagatacacctgcaaaggcggcacaaccccagtgccacgttgtgagttggatagttgtggaaagagtcaaatggctctcctcaagcgtattcaacaaggggctgaaggatgcccagaaggtaccccattgtatgggatctgatctggggcctcggtgcacatgctttacatgtgtttagtcgaggttaaaaaacgtctaggccccccgaaccacggggacgtggttttcctttgaaaaacacgatgataat

SEQ ID NO: 554 - RNA, 4284 nt, synthetic construct
  source 1..4284: mol_type = other RNA
  modified_base 6: mod_base = OTHER; note = 1-methyl-3'-pseudouridylyl
  modified_base 11: mod_base = OTHER; note = 1-methyl-3'-pseudouridylyl
  modified_base 14: mod_base = OTHER; note = 1-methyl-3'-pseudouridylyl
  modified_base 16: mod_base = OTHER; note = 1-methyl-3'-pseudouridylyl
  modified_base 17: mod_base = OTHER; note = 1-methyl-3'-pseudouridylyl
  modified_base 19: mod_base = OTHER; note = 1-methyl-3'-pseudouridylyl
  modified_base 20: mod_base = OTHER; note = 1-methyl-3'-pseudouridylyl
  modified_base 22: mod_base = OTHER; note = 1-methyl-3'-pseudouridylyl
  modified_base 25: mod_base = OTHER; note = 1-methyl-3'-pseudouridylyl
  modified_base 36: mod_base = OTHER; note = 1-methyl-3'-pseudouridylyl
  modified_base 56: mod_base = OTHER; note = 1-methyl-3'-pseudouridylyl
  modified_base 58: mod_base = OTHER; note = 1-methyl-3'-pseudouridylyl
  modified_base 59: mod_base = OTHER; note = 1-methyl-3'-pseudouridylyl
  modified_base 62: mod_base = OTHER; note = 1-methyl-3'-pseudouridylyl
  modified_base 64: mod_base = OTHER; note = 1-methyl-3'-pseudouridylyl
  modified_base 65: mod_base = OTHER; note = 1-methyl-3'-pseudouridylyl
  modified_base 68: mod_base = OTHER; note = 1-methyl-3'-pseudouridylyl
  modified_base 71: mod_base = OTHER; note = 1-methyl-3'-pseudouridylyl
  modified_base 74: mod_base = OTHER; note = 1-methyl-3'-pseudouridylyl
  modified_base 77: mod_base = OTHER; note = 1-methyl-3'-pseudouridylyl
  modified_base 81: mod_base = OTHER; note = 1-methyl-3'-pseudouridylyl
  modified_base 83: mod_base = OTHER; note = 1-methyl-3'-pseudouridylyl
  modified_base 86: mod_base = OTHER; note = 1-methyl-3'-pseudouridylyl
  modified_base 88: mod_base = OTHER; note = 1-methyl-3'-pseudouridylyl
  modified_base 97: mod_base = OTHER; note = 1-methyl-3'-pseudouridylyl
  modified_base 99: mod_base = OTHER; note = 1-methyl-3'-pseudouridylyl
  modified_base 101: mod_base = OTHER; note = 1-methyl-3'-pseudouridylyl
  modified_base 107: mod_base = OTHER; note = 1-methyl-3'-pseudouridylyl
  modified_base 125: mod_base = OTHER; note = 1-methyl-3'-pseudouridylyl
  modified_base 129: mod_base = OTHER; note = 1-methyl-3'-pseudouridylyl
  modified_base 136: mod_base = OTHER; note = 1-methyl-3'-pseudouridylyl
  modified_base 148: mod_base = OTHER; note = 1-methyl-3'-pseudouridylyl
  modified_base 149: mod_base = OTHER; note = 1-methyl-3'-pseudouridylyl
  modified_base 150: mod_base = OTHER; note = 1-methyl-3'-pseudouridylyl
  modified_base 161: mod_base = OTHER; note = 1-methyl-3'-pseudouridylyl
  modified_base 163: mod_base = OTHER; note = 1-methyl-3'-pseudouridylyl
  modified_base 166: mod_base = OTHER; note = 1-methyl-3'-pseudouridylyl
  modified_base 179: mod_base = OTHER; note = 1-methyl-3'-pseudouridylyl
  modified_base 181: mod_base = OTHER; note = 1-methyl-3'-pseudouridylyl
  modified_base 182: mod_base = OTHER; note = 1-methyl-3'-pseudouridylyl
  modified_base 187: mod_base = OTHER; note = 1-methyl-3'-pseudouridylyl
  modified_base 194: mod_base = OTHER; note = 1-methyl-3'-pseudouridylyl
  modified_base 197: mod_base = OTHER; note = 1-methyl-3'-pseudouridylyl
  modified_base 202: mod_base = OTHER; note = 1-methyl-3'-pseudouridylyl
  modified_base 204: mod_base = OTHER; note = 1-methyl-3'-pseudouridylyl
  modified_base 215: mod_base = OTHER; note = 1-methyl-3'-pseudouridylyl
  modified_base 217: mod_base = OTHER; note = 1-methyl-3'-pseudouridylyl
  modified_base 218: mod_base = OTHER; note = 1-methyl-3'-pseudouridylyl
  modified_base 221: mod_base = OTHER; note = 1-methyl-3'-pseudouridylyl
  modified_base 225: mod_base = OTHER; note = 1-methyl-3'-pseudouridylyl
  modified_base 226: mod_base = OTHER; note = 1-methyl-3'-pseudouridylyl
  modified_base 227: mod_base = OTHER; note = 1-methyl-3'-pseudouridylyl
  modified_base 229: mod_base = OTHER; note = 1-methyl-3'-pseudouridylyl
  modified_base 230: mod_base = OTHER; note = 1-methyl-3'-pseudouridylyl
  modified_base 239: mod_base = OTHER; note = 1-methyl-3'-pseudouridylyl
  modified_base 244: mod_base = OTHER; note = 1-methyl-3'-pseudouridylyl
  modified_base 247: mod_base = OTHER; note = 1-methyl-3'-pseudouridylyl
  modified_base 248: mod_base = OTHER; note = 1-methyl-3'-pseudouridylyl
  modified_base 257: mod_base = OTHER; note = 1-methyl-3'-pseudouridylyl
  modified_base 263: mod_base = OTHER; note = 1-methyl-3'-pseudouridylyl
  modified_base 265: mod_base = OTHER; note = 1-methyl-3'-pseudouridylyl
  modified_base 276: mod_base = OTHER; note = 1-methyl-3'-pseudouridylyl
  modified_base 289: mod_base = OTHER; note = 1-methyl-3'-pseudouridylyl
  modified_base 290: mod_base = OTHER; note = 1-methyl-3'-pseudouridylyl
  modified_base 302: mod_base = OTHER; note = 1-methyl-3'-pseudouridylyl
  modified_base 305: mod_base = OTHER; note = 1-methyl-3'-pseudouridylyl
  modified_base 305: mod_base = OTHER; note = 1-methyl-3'-pseudouridylyl
  modified_base 310: mod_base = OTHER; note = 1-methyl-3'-pseudouridylyl
  modified_base 311: mod_base = OTHER; note = 1-methyl-3'-pseudouridylyl
  modified_base 323: mod_base = OTHER; note = 1-methyl-3'-pseudouridylyl
  modified_base 325: mod_base = OTHER; note = 1-methyl-3'-pseudouridylyl
  modified_base 328: mod_base = OTHER; note = 1-methyl-3'-pseudouridylyl
  modified_base 329: mod_base = OTHER; note = 1-methyl-3'-pseudouridylyl
  modified_base 330: mod_base = OTHER; note = 1-methyl-3'-pseudouridylyl
  modified_base 346: mod_base = OTHER; note = 1-methyl-3'-pseudouridylyl
  modified_base 353: mod_base = OTHER; note = 1-methyl-3'-pseudouridylyl
  modified_base 356: mod_base = OTHER; note = 1-methyl-3'-pseudouridylyl
  modified_base 364: mod_base = OTHER; note = 1-methyl-3'-pseudouridylyl
  modified_base 368: mod_base = OTHER; note = 1-methyl-3'-pseudouridylyl
  modified_base 370: mod_base = OTHER; note = 1-methyl-3'-pseudouridylyl
  modified_base 371: mod_base = OTHER; note = 1-methyl-3'-pseudouridylyl
  modified_base 383: mod_base = OTHER; note = 1-methyl-3'-pseudouridylyl
  modified_base 404: mod_base = OTHER; note = 1-methyl-3'-pseudouridylyl
  modified_base 407: mod_base = OTHER; note = 1-methyl-3'-pseudouridylyl
  modified_base 410: mod_base = OTHER; note = 1-methyl-3'-pseudouridylyl
  modified_base 413: mod_base = OTHER; note = 1-methyl-3'-pseudouridylyl
  modified_base 431: mod_base = OTHER; note = 1-methyl-3'-pseudouridylyl
  modified_base 434: mod_base = OTHER; note = 1-methyl-3'-pseudouridylyl
  modified_base 437: mod_base = OTHER; note = 1-methyl-3'-pseudouridylyl
  modified_base 443: mod_base = OTHER; note = 1-methyl-3'-pseudouridylyl
  modified_base 445: mod_base = OTHER; note = 1-methyl-3'-pseudouridylyl
  modified_base 451: mod_base = OTHER; note = 1-methyl-3'-pseudouridylyl
  modified_base 452: mod_base = OTHER; note = 1-methyl-3'-pseudouridylyl
  modified_base 457: mod_base = OTHER; note = 1-methyl-3'-pseudouridylyl
  modified_base 458: mod_base = OTHER; note = 1-methyl-3'-pseudouridylyl
  modified_base 460: mod_base = OTHER; note = 1-methyl-3'-pseudouridylyl
  modified_base 472: mod_base = OTHER; note = 1-methyl-3'-pseudouridylyl
  modified_base 473: mod_base = OTHER; note = 1-methyl-3'-pseudouridylyl
  modified_base 476: mod_base = OTHER; note = 1-methyl-3'-pseudouridylyl
  modified_base 482: mod_base = OTHER; note = 1-methyl-3'-pseudouridylyl
  modified_base 484: mod_base = OTHER; note = 1-methyl-3'-pseudouridylyl
  modified_base 487: mod_base = OTHER; note = 1-methyl-3'-pseudouridylyl
  modified_base 508: mod_base = OTHER; note = 1-methyl-3'-pseudouridylyl
  modified_base 512: mod_base = OTHER; note = 1-methyl-3'-pseudouridylyl
  modified_base 523: mod_base = OTHER; note = 1-methyl-3'-pseudouridylyl
  modified_base 524: mod_base = OTHER; note = 1-methyl-3'-pseudouridylyl
  modified_base 530: mod_base = OTHER; note = 1-methyl-3'-pseudouridylyl
  modified_base 532: mod_base = OTHER; note = 1-methyl-3'-pseudouridylyl
  modified_base 550: mod_base = OTHER; note = 1-methyl-3'-pseudouridylyl
  modified_base 556: mod_base = OTHER; note = 1-methyl-3'-pseudouridylyl
  modified_base 557: mod_base = OTHER; note = 1-methyl-3'-pseudouridylyl
  modified_base 562: mod_base = OTHER; note = 1-methyl-3'-pseudouridylyl
  modified_base 566: mod_base = OTHER; note = 1-methyl-3'-pseudouridylyl
  modified_base 568: mod_base = OTHER; note = 1-methyl-3'-pseudouridylyl
  modified_base 576: mod_base = OTHER; note = 1-methyl-3'-pseudouridylyl
  modified_base 577: mod_base = OTHER; note = 1-methyl-3'-pseudouridylyl
  modified_base 578: mod_base = OTHER; note = 1-methyl-3'-pseudouridylyl
  modified_base 581: mod_base = OTHER; note = 1-methyl-3'-pseudouridylyl
  modified_base 584: mod_base = OTHER; note = 1-methyl-3'-pseudouridylyl
  modified_base 590: mod_base = OTHER; note = 1-methyl-3'-pseudouridylyl
  modified_base 610: mod_base = OTHER; note = 1-methyl-3'-pseudouridylyl
  modified_base 611: mod_base = OTHER; note = 1-methyl-3'-pseudouridylyl
  modified_base 620: mod_base = OTHER; note = 1-methyl-3'-pseudouridylyl
  modified_base 628: mod_base = OTHER; note = 1-methyl-3'-pseudouridylyl
  modified_base 629: mod_base = OTHER; note = 1-methyl-3'-pseudouridylyl
  modified_base 632: mod_base = OTHER; note = 1-methyl-3'-pseudouridylyl
  modified_base 634: mod_base = OTHER; note = 1-methyl-3'-pseudouridylyl
  modified_base 635: mod_base = OTHER; note = 1-methyl-3'-pseudouridylyl
  modified_base 636: mod_base = OTHER; note = 1-methyl-3'-pseudouridylyl
  modified_base 644: mod_base = OTHER; note = 1-methyl-3'-pseudouridylyl
  modified_base 652: mod_base = OTHER; note = 1-methyl-3'-pseudouridylyl
  modified_base 655: mod_base = OTHER; note = 1-methyl-3'-pseudouridylyl
  modified_base 656: mod_base = OTHER; note = 1-methyl-3'-pseudouridylyl
  modified_base 662: mod_base = OTHER; note = 1-methyl-3'-pseudouridylyl
  modified_base 664: mod_base = OTHER; note = 1-methyl-3'-pseudouridylyl
  modified_base 681: mod_base = OTHER; note = 1-methyl-3'-pseudouridylyl
  modified_base 683: mod_base = OTHER; note = 1-methyl-3'-pseudouridylyl
  modified_base 689: mod_base = OTHER; note = 1-methyl-3'-pseudouridylyl
  modified_base 692: mod_base = OTHER; note = 1-methyl-3'-pseudouridylyl
  modified_base 699: mod_base = OTHER; note = 1-methyl-3'-pseudouridylyl
  modified_base 701: mod_base = OTHER; note = 1-methyl-3'-pseudouridylyl
  modified_base 705: mod_base = OTHER; note = 1-methyl-3'-pseudouridylyl
  modified_base 712: mod_base = OTHER; note = 1-methyl-3'-pseudouridylyl
  modified_base 713: mod_base = OTHER; note = 1-methyl-3'-pseudouridylyl
  modified_base 715: mod_base = OTHER; note = 1-methyl-3'-pseudouridylyl
  modified_base 717: mod_base = OTHER; note = 1-methyl-3'-pseudouridylyl
  modified_base 720: mod_base = OTHER; note = 1-methyl-3'-pseudouridylyl
  modified_base 722: mod_base = OTHER; note = 1-methyl-3'-pseudouridylyl
  modified_base 731: mod_base = OTHER; note = 1-methyl-3'-pseudouridylyl
  modified_base 734: mod_base = OTHER; note = 1-methyl-3'-pseudouridylyl
  modified_base 738: mod_base = OTHER; note = 1-methyl-3'-pseudouridylyl
  modified_base 740: mod_base = OTHER; note = 1-methyl-3'-pseudouridylyl
  modified_base 746: mod_base = OTHER; note = 1-methyl-3'-pseudouridylyl
  modified_base 752: mod_base = OTHER; note = 1-methyl-3'-pseudouridylyl
  modified_base 758: mod_base = OTHER; note = 1-methyl-3'-pseudouridylyl
  modified_base 766: mod_base = OTHER; note = 1-methyl-3'-pseudouridylyl
  modified_base 767: mod_base = OTHER; note = 1-methyl-3'-pseudouridylyl
  modified_base 768: mod_base = OTHER; note = 1-methyl-3'-pseudouridylyl
  modified_base 776: mod_base = OTHER; note = 1-methyl-3'-pseudouridylyl
  modified_base 779: mod_base = OTHER; note = 1-methyl-3'-pseudouridylyl
  modified_base 785: mod_base = OTHER; note = 1-methyl-3'-pseudouridylyl
  modified_base 796: mod_base = OTHER; note = 1-methyl-3'-pseudouridylyl
  modified_base 800: mod_base = OTHER; note = 1-methyl-3'-pseudouridylyl
  modified_base 807: mod_base = OTHER; note = 1-methyl-3'-pseudouridylyl
  modified_base 813: mod_base = OTHER; note = 1-methyl-3'-pseudouridylyl
  modified_base 813: mod_base = OTHER; note = 1-methyl-3'-pseudouridylyl
  modified_base 826: mod_base = OTHER; note = 1-methyl-3'-pseudouridylyl
  modified_base 834: mod_base = OTHER; note = 1-methyl-3'-pseudouridylyl
  modified_base 837: mod_base = OTHER; note = 1-methyl-3'-pseudouridylyl
  modified_base 846: mod_base = OTHER; note = 1-methyl-3'-pseudouridylyl
  modified_base 847: mod_base = OTHER; note = 1-methyl-3'-pseudouridylyl
  modified_base 850: mod_base = OTHER; note = 1-methyl-3'-pseudouridylyl
  modified_base 852: mod_base = OTHER; note = 1-methyl-3'-pseudouridylyl
  modified_base 854: mod_base = OTHER; note = 1-methyl-3'-pseudouridylyl
  modified_base 859: mod_base = OTHER; note = 1-methyl-3'-pseudouridylyl
  modified_base 863: mod_base = OTHER; note = 1-methyl-3'-pseudouridylyl
  modified_base 870: mod_base = OTHER; note = 1-methyl-3'-pseudouridylyl
  modified_base 877: mod_base = OTHER; note = 1-methyl-3'-pseudouridylyl
  modified_base 878: mod_base = OTHER; note = 1-methyl-3'-pseudouridylyl
  modified_base 881: mod_base = OTHER; note = 1-methyl-3'-pseudouridylyl
  modified_base 884: mod_base = OTHER; note = 1-methyl-3'-pseudouridylyl
  modified_base 889: mod_base = OTHER; note = 1-methyl-3'-pseudouridylyl
  modified_base 908: mod_base = OTHER; note = 1-methyl-3'-pseudouridylyl
  modified_base 902: mod_base = OTHER; note = 1-methyl-3'-pseudouridylyl
  modified_base 924: mod_base = OTHER; note = 1-methyl-3'-pseudouridylyl
  modified_base 925: mod_base = OTHER; note = 1-methyl-3'-pseudouridylyl
  modified_base 927: mod_base = OTHER; note = 1-methyl-3'-pseudouridylyl
  modified_base 930: mod_base = OTHER; note = 1-methyl-3'-pseudouridylyl
  modified_base 932: mod_base = OTHER; note = 1-methyl-3'-pseudouridylyl
  modified_base 936: mod_base = OTHER; note = 1-methyl-3'-pseudouridylyl
  modified_base 939: mod_base = OTHER; note = 1-methyl-3'-pseudouridylyl
  modified_base 941: mod_base = OTHER; note = 1-methyl-3'-pseudouridylyl
  modified_base 955: mod_base = OTHER; note = 1-methyl-3'-pseudouridylyl
  modified_base 962: mod_base = OTHER; note = 1-methyl-3'-pseudouridylyl
  modified_base 967: mod_base = OTHER; note = 1-methyl-3'-pseudouridylyl
  modified_base 970: mod_base = OTHER; note = 1-methyl-3'-pseudouridylyl
  modified_base 971: mod_base = OTHER; note = 1-methyl-3'-pseudouridylyl
  modified_base 977: mod_base = OTHER; note = 1-methyl-3'-pseudouridylyl
  modified_base 989: mod_base = OTHER; note = 1-methyl-3'-pseudouridylyl
  modified_base 991: mod_base = OTHER; note = 1-methyl-3'-pseudouridylyl
  modified_base 1006: mod_base = OTHER; note = 1-methyl-3'-pseudouridylyl
  modified_base 1007: mod_base = OTHER; note = 1-methyl-3'-pseudouridylyl
  modified_base 1013: mod_base = OTHER; note = 1-methyl-3'-pseudouridylyl
  modified_base 1027: mod_base = OTHER; note = 1-methyl-3'-pseudouridylyl
  modified_base 1031: mod_base = OTHER; note = 1-methyl-3'-pseudouridylyl
  modified_base 1034: mod_base = OTHER; note = 1-methyl-3'-pseudouridylyl
  modified_base 1039: mod_base = OTHER; note = 1-methyl-3'-pseudouridylyl
  modified_base 1040: mod_base = OTHER; note = 1-methyl-3'-pseudouridylyl
  modified_base 1047: mod_base = OTHER; note = 1-methyl-3'-pseudouridylyl
  modified_base 1049: mod_base = OTHER; note = 1-methyl-3'-pseudouridylyl
  modified_base 1056: mod_base = OTHER; note = 1-methyl-3'-pseudouridylyl
  modified_base 1058: mod_base = OTHER; note = 1-methyl-3'-pseudouridylyl
  modified_base 1060: mod_base = OTHER; note = 1-methyl-3'-pseudouridylyl
  modified_base 1066: mod_base = OTHER; note = 1-methyl-3'-pseudouridylyl
  modified_base 1067: mod_base = OTHER; note = 1-methyl-3'-pseudouridylyl
  modified_base 1076: mod_base = OTHER; note = 1-methyl-3'-pseudouridylyl
  modified_base 1078: mod_base = OTHER; note = 1-methyl-3'-pseudouridylyl
  modified_base 1079: mod_base = OTHER; note = 1-methyl-3'-pseudouridylyl
  modified_base 1083: mod_base = OTHER; note = 1-methyl-3'-pseudouridylyl
  modified_base 1093: mod_base = OTHER; note = 1-methyl-3'-pseudouridylyl
  modified_base 1094: mod_base = OTHER; note = 1-methyl-3'-pseudouridylyl
  modified_base 1099: mod_base = OTHER; note = 1-methyl-3'-pseudouridylyl
  modified_base 1101: mod_base = OTHER; note = 1-methyl-3'-pseudouridylyl
  modified_base 1103: mod_base = OTHER; note = 1-methyl-3'-pseudouridylyl
  modified_base 1105: mod_base = OTHER; note = 1-methyl-3'-pseudouridylyl
  modified_base 1111: mod_base = OTHER; note = 1-methyl-3'-pseudouridylyl
  modified_base 1127: mod_base = OTHER; note = 1-methyl-3'-pseudouridylyl
  modified_base 1134: mod_base = OTHER; note = 1-methyl-3'-pseudouridylyl
  modified_base 1135: mod_base = OTHER; note = 1-methyl-3'-pseudouridylyl
  modified_base 1139: mod_base = OTHER; note = 1-methyl-3'-pseudouridylyl
  modified_base 1147: mod_base = OTHER; note = 1-methyl-3'-pseudouridylyl
  modified_base 1150: mod_base = OTHER; note = 1-methyl-3'-pseudouridylyl
  modified_base 1154: mod_base = OTHER; note = 1-methyl-3'-pseudouridylyl
  modified_base 1157: mod_base = OTHER; note = 1-methyl-3'-pseudouridylyl
  modified_base 1159: mod_base = OTHER; note = 1-methyl-3'-pseudouridylyl
  modified_base 1165: mod_base = OTHER; note = 1-methyl-3'-pseudouridylyl
  modified_base 1174: mod_base = OTHER; note = 1-methyl-3'-pseudouridylyl
  modified_base 1175: mod_base = OTHER; note = 1-methyl-3'-pseudouridylyl
  modified_base 1183: mod_base = OTHER; note = 1-methyl-3'-pseudouridylyl
  modified_base 1184: mod_base = OTHER; note = 1-methyl-3'-pseudouridylyl
  modified_base 1189: mod_base = OTHER; note = 1-methyl-3'-pseudouridylyl
  modified_base 1192: mod_base = OTHER; note = 1-methyl-3'-pseudouridylyl
  modified_base 1199: mod_base = OTHER; note = 1-methyl-3'-pseudouridylyl
  modified_base 1201: mod_base = OTHER; note = 1-methyl-3'-pseudouridylyl
  modified_base 1206: mod_base = OTHER; note = 1-methyl-3'-pseudouridylyl
  modified_base 1214: mod_base = OTHER; note = 1-methyl-3'-pseudouridylyl
  modified_base 1223: mod_base = OTHER; note = 1-methyl-3'-pseudouridylyl
  modified_base 1225: mod_base = OTHER; note = 1-methyl-3'-pseudouridylyl
  modified_base 1228: mod_base = OTHER; note = 1-methyl-3'-pseudouridylyl
  modified_base 1229: mod_base = OTHER; note = 1-methyl-3'-pseudouridylyl
  modified_base 1238: mod_base = OTHER; note = 1-methyl-3'-pseudouridylyl
  modified_base 1240: mod_base = OTHER; note = 1-methyl-3'-pseudouridylyl
  modified_base 1252: mod_base = OTHER; note = 1-methyl-3'-pseudouridylyl
  modified_base 1253: mod_base = OTHER; note = 1-methyl-3'-pseudouridylyl
  modified_base 1256: mod_base = OTHER; note = 1-methyl-3'-pseudouridylyl
  modified_base 1259: mod_base = OTHER; note = 1-methyl-3'-pseudouridylyl
  modified_base 1269: mod_base = OTHER; note = 1-methyl-3'-pseudouridylyl
  modified_base 1274: mod_base = OTHER; note = 1-methyl-3'-pseudouridylyl
  modified_base 1283: mod_base = OTHER; note = 1-methyl-3'-pseudouridylyl
  modified_base 1284: mod_base = OTHER; note = 1-methyl-3'-pseudouridylyl
  modified_base 1290: mod_base = OTHER; note = 1-methyl-3'-pseudouridylyl
  modified_base 1307: mod_base = OTHER; note = 1-methyl-3'-pseudouridylyl
  modified_base 1315: mod_base = OTHER; note = 1-methyl-3'-pseudouridylyl
  modified_base 1321: mod_base = OTHER; note = 1-methyl-3'-pseudouridylyl
  modified_base 1328: mod_base = OTHER; note = 1-methyl-3'-pseudouridylyl
  modified_base 1339: mod_base = OTHER; note = 1-methyl-3'-pseudouridylyl
  modified_base 1340: mod_base = OTHER; note = 1-methyl-3'-pseudouridylyl
  modified_base 1348: mod_base = OTHER; note = 1-methyl-3'-pseudouridylyl
  modified_base 1350: mod_base = OTHER; note = 1-methyl-3'-pseudouridylyl
  modified_base 1352: mod_base = OTHER; note = 1-methyl-3'-pseudouridylyl
  modified_base 1355: mod_base = OTHER; note = 1-methyl-3'-pseudouridylyl
  modified_base 1356: mod_base = OTHER; note = 1-methyl-3'-pseudouridylyl
  modified_base 1360: mod_base = OTHER; note = 1-methyl-3'-pseudouridylyl
  modified_base 1376: mod_base = OTHER; note = 1-methyl-3'-pseudouridylyl
  modified_base 1381: mod_base = OTHER; note = 1-methyl-3'-pseudouridylyl
  modified_base 1388: mod_base = OTHER; note = 1-methyl-3'-pseudouridylyl
  modified_base 1399: mod_base = OTHER; note = 1-methyl-3'-pseudouridylyl
  modified_base 1404: mod_base = OTHER; note = 1-methyl-3'-pseudouridylyl
  modified_base 1405: mod_base = OTHER; note = 1-methyl-3'-pseudouridylyl
  modified_base 1409: mod_base = OTHER; note = 1-methyl-3'-pseudouridylyl
  modified_base 1411: mod_base = OTHER; note = 1-methyl-3'-pseudouridylyl
  modified_base 1418: mod_base = OTHER; note = 1-methyl-3'-pseudouridylyl
  modified_base 1420: mod_base = OTHER; note = 1-methyl-3'-pseudouridylyl
  modified_base 1421: mod_base = OTHER; note = 1-methyl-3'-pseudouridylyl
  modified_base 1429: mod_base = OTHER; note = 1-methyl-3'-pseudouridylyl
  modified_base 1434: mod_base = OTHER; note = 1-methyl-3'-pseudouridylyl
  modified_base 1436: mod_base = OTHER; note = 1-methyl-3'-pseudouridylyl
  modified_base 1444: mod_base = OTHER; note = 1-methyl-3'-pseudouridylyl
  modified_base 1445: mod_base = OTHER; note = 1-methyl-3'-pseudouridylyl
  modified_base 1457: mod_base = OTHER; note = 1-methyl-3'-pseudouridylyl
  modified_base 1459: mod_base = OTHER; note = 1-methyl-3'-pseudouridylyl
  modified_base 1469: mod_base = OTHER; note = 1-methyl-3'-pseudouridylyl
  modified_base 1471: mod_base = OTHER; note = 1-methyl-3'-pseudouridylyl
  modified_base 1473: mod_base = OTHER; note = 1-methyl-3'-pseudouridylyl
  modified_base 1491: mod_base = OTHER; note = 1-methyl-3'-pseudouridylyl
  modified_base 1492: mod_base = OTHER; note = 1-methyl-3'-pseudouridylyl
  modified_base 1494: mod_base = OTHER; note = 1-methyl-3'-pseudouridylyl
  modified_base 1502: mod_base = OTHER; note = 1-methyl-3'-pseudouridylyl
  modified_base 1510: mod_base = OTHER; note = 1-methyl-3'-pseudouridylyl
  modified_base 1511: mod_base = OTHER; note = 1-methyl-3'-pseudouridylyl
  modified_base 1516: mod_base = OTHER; note = 1-methyl-3'-pseudouridylyl
  modified_base 1519: mod_base = OTHER; note = 1-methyl-3'-pseudouridylyl
  modified_base 1522: mod_base = OTHER; note = 1-methyl-3'-pseudouridylyl
  modified_base 1523: mod_base = OTHER; note = 1-methyl-3'-pseudouridylyl
  modified_base 1529: mod_base = OTHER; note = 1-methyl-3'-pseudouridylyl
  modified_base 1534: mod_base = OTHER; note = 1-methyl-3'-pseudouridylyl
  modified_base 1537: mod_base = OTHER; note = 1-methyl-3'-pseudouridylyl
  modified_base 1543: mod_base = OTHER; note = 1-methyl-3'-pseudouridylyl
  modified_base 1544: mod_base = OTHER; note = 1-methyl-3'-pseudouridylyl
  modified_base 1545: mod_base = OTHER; note = 1-methyl-3'-pseudouridylyl
  modified_base 1557: mod_base = OTHER; note = 1-methyl-3'-pseudouridylyl
  modified_base 1562: mod_base = OTHER; note = 1-methyl-3'-pseudouridylyl
  modified_base 1567: mod_base = OTHER; note = 1-methyl-3'-pseudouridylyl
  modified_base 1569: mod_base = OTHER; note = 1-methyl-3'-pseudouridylyl
  modified_base 1576: mod_base = OTHER; note = 1-methyl-3'-pseudouridylyl
  modified_base 1583: mod_base = OTHER; note = 1-methyl-3'-pseudouridylyl
  modified_base 1586: mod_base = OTHER; note = 1-methyl-3'-pseudouridylyl
  modified_base 1589: mod_base = OTHER; note = 1-methyl-3'-pseudouridylyl
  modified_base 1592: mod_base = OTHER; note = 1-methyl-3'-pseudouridylyl
  modified_base 1597: mod_base = OTHER; note = 1-methyl-3'-pseudouridylyl
  modified_base 1598: mod_base = OTHER; note = 1-methyl-3'-pseudouridylyl
  modified_base 1604: mod_base = OTHER; note = 1-methyl-3'-pseudouridylyl
  modified_base 1607: mod_base = OTHER; note = 1-methyl-3'-pseudouridylyl
  modified_base 1611: mod_base = OTHER; note = 1-methyl-3'-pseudouridylyl
  modified_base 1617: mod_base = OTHER; note = 1-methyl-3'-pseudouridylyl
  modified_base 1625: mod_base = OTHER; note = 1-methyl-3'-pseudouridylyl
  modified_base 1627: mod_base = OTHER; note = 1-methyl-3'-pseudouridylyl
  modified_base 1635: mod_base = OTHER; note = 1-methyl-3'-pseudouridylyl
  modified_base 1650: mod_base = OTHER; note = 1-methyl-3'-pseudouridylyl
  modified_base 1652: mod_base = OTHER; note = 1-methyl-3'-pseudouridylyl
  modified_base 1655: mod_base = OTHER; note = 1-methyl-3'-pseudouridylyl
  modified_base 1666: mod_base = OTHER; note = 1-methyl-3'-pseudouridylyl
  modified_base 1670: mod_base = OTHER; note = 1-methyl-3'-pseudouridylyl
  modified_base 1675: mod_base = OTHER; note = 1-methyl-3'-pseudouridylyl
  modified_base 1676: mod_base = OTHER; note = 1-methyl-3'-pseudouridylyl
  modified_base 1681: mod_base = OTHER; note = 1-methyl-3'-pseudouridylyl
  modified_base 1682: mod_base = OTHER; note = 1-methyl-3'-pseudouridylyl
  modified_base 1691: mod_base = OTHER; note = 1-methyl-3'-pseudouridylyl
  modified_base 1706: mod_base = OTHER; note = 1-methyl-3'-pseudouridylyl
  modified_base 1709: mod_base = OTHER; note = 1-methyl-3'-pseudouridylyl
  modified_base 1729: mod_base = OTHER; note = 1-methyl-3'-pseudouridylyl
  modified_base 1730: mod_base = OTHER; note = 1-methyl-3'-pseudouridylyl
  modified_base 1733: mod_base = OTHER; note = 1-methyl-3'-pseudouridylyl
  modified_base 1738: mod_base = OTHER; note = 1-methyl-3'-pseudouridylyl
  modified_base 1739: mod_base = OTHER; note = 1-methyl-3'-pseudouridylyl
  modified_base 1747: mod_base = OTHER; note = 1-methyl-3'-pseudouridylyl
  modified_base 1748: mod_base = OTHER; note = 1-methyl-3'-pseudouridylyl
  modified_base 1749: mod_base = OTHER; note = 1-methyl-3'-pseudouridylyl
  modified_base 1758: mod_base = OTHER; note = 1-methyl-3'-pseudouridylyl
  modified_base 1760: mod_base = OTHER; note = 1-methyl-3'-pseudouridylyl
  modified_base 1767: mod_base = OTHER; note = 1-methyl-3'-pseudouridylyl
  modified_base 1781: mod_base = OTHER; note = 1-methyl-3'-pseudouridylyl
  modified_base 1782: mod_base = OTHER; note = 1-methyl-3'-pseudouridylyl
  modified_base 1788: mod_base = OTHER; note = 1-methyl-3'-pseudouridylyl
  modified_base 1799: mod_base = OTHER; note = 1-methyl-3'-pseudouridylyl
  modified_base 1805: mod_base = OTHER; note = 1-methyl-3'-pseudouridylyl
  modified_base 1808: mod_base = OTHER; note = 1-methyl-3'-pseudouridylyl
  modified_base 1814: mod_base = OTHER; note = 1-methyl-3'-pseudouridylyl
  modified_base 1821: mod_base = OTHER; note = 1-methyl-3'-pseudouridylyl
  modified_base 1822: mod_base = OTHER; note = 1-methyl-3'-pseudouridylyl
  modified_base 1828: mod_base = OTHER; note = 1-methyl-3'-pseudouridylyl
  modified_base 1829: mod_base = OTHER; note = 1-methyl-3'-pseudouridylyl
  modified_base 1838: mod_base = OTHER; note = 1-methyl-3'-pseudouridylyl
  modified_base 1840: mod_base = OTHER; note = 1-methyl-3'-pseudouridylyl
  modified_base 1842: mod_base = OTHER; note = 1-methyl-3'-pseudouridylyl
  modified_base 1844: mod_base = OTHER; note = 1-methyl-3'-pseudouridylyl
  modified_base 1847: mod_base = OTHER; note = 1-methyl-3'-pseudouridylyl
  modified_base 1854: mod_base = OTHER; note = 1-methyl-3'-pseudouridylyl
  modified_base 1872: mod_base = OTHER; note = 1-methyl-3'-pseudouridylyl
  modified_base 1877: mod_base = OTHER; note = 1-methyl-3'-pseudouridylyl
  modified_base 1883: mod_base = OTHER; note = 1-methyl-3'-pseudouridylyl
  modified_base 1886: mod_base = OTHER; note = 1-methyl-3'-pseudouridylyl
  modified_base 1888: mod_base = OTHER; note = 1-methyl-3'-pseudouridylyl
  modified_base 1898: mod_base = OTHER; note = 1-methyl-3'-pseudouridylyl
  modified_base 1903: mod_base = OTHER; note = 1-methyl-3'-pseudouridylyl
  modified_base 1905: mod_base = OTHER; note = 1-methyl-3'-pseudouridylyl
  modified_base 1913: mod_base = OTHER; note = 1-methyl-3'-pseudouridylyl
  modified_base 1919: mod_base = OTHER; note = 1-methyl-3'-pseudouridylyl
  modified_base 1925: mod_base = OTHER; note = 1-methyl-3'-pseudouridylyl
  modified_base 1926: mod_base = OTHER; note = 1-methyl-3'-pseudouridylyl
  modified_base 1935: mod_base = OTHER; note = 1-methyl-3'-pseudouridylyl
  modified_base 1940: mod_base = OTHER; note = 1-methyl-3'-pseudouridylyl
  modified_base 1947: mod_base = OTHER; note = 1-methyl-3'-pseudouridylyl
  modified_base 1951: mod_base = OTHER; note = 1-methyl-3'-pseudouridylyl
  modified_base 1958: mod_base = OTHER; note = 1-methyl-3'-pseudouridylyl
  modified_base 1960: mod_base = OTHER; note = 1-methyl-3'-pseudouridylyl
  modified_base 1963: mod_base = OTHER; note = 1-methyl-3'-pseudouridylyl
  modified_base 1963: mod_base = OTHER; note = 1-methyl-3'-pseudouridylyl
  modified_base 1977: mod_base = OTHER; note = 1-methyl-3'-pseudouridylyl
  modified_base 1979: mod_base = OTHER; note = 1-methyl-3'-pseudouridylyl
  modified_base 1981: mod_base = OTHER; note = 1-methyl-3'-pseudouridylyl
  modified_base 1982: mod_base = OTHER; note = 1-methyl-3'-pseudouridylyl
  modified_base 1983: mod_base = OTHER; note = 1-methyl-3'-pseudouridylyl
  modified_base 1999: mod_base = OTHER; note = 1-methyl-3'-pseudouridylyl
  modified_base 2001: mod_base = OTHER; note = 1-methyl-3'-pseudouridylyl
  modified_base 2003: mod_base = OTHER; note = 1-methyl-3'-pseudouridylyl
  modified_base 2006: mod_base = OTHER; note = 1-methyl-3'-pseudouridylyl
  modified_base 2021: mod_base = OTHER; note = 1-methyl-3'-pseudouridylyl
  modified_base 2021: mod_base = OTHER; note = 1-methyl-3'-pseudouridylyl
  modified_base 2028: mod_base = OTHER; note = 1-methyl-3'-pseudouridylyl
  modified_base 2032: mod_base = OTHER; note = 1-methyl-3'-pseudouridylyl
  modified_base 2038: mod_base = OTHER; note = 1-methyl-3'-pseudouridylyl
  modified_base 2045: mod_base = OTHER; note = 1-methyl-3'-pseudouridylyl
  modified_base 2051: mod_base = OTHER; note = 1-methyl-3'-pseudouridylyl
  modified_base 2058: mod_base = OTHER; note = 1-methyl-3'-pseudouridylyl
  modified_base 2063: mod_base = OTHER; note = 1-methyl-3'-pseudouridylyl
  modified_base 2065: mod_base = OTHER; note = 1-methyl-3'-pseudouridylyl
  modified_base 2074: mod_base = OTHER; note = 1-methyl-3'-pseudouridylyl
  modified_base 2097: mod_base = OTHER; note = 1-methyl-3'-pseudouridylyl
  modified_base 2114: mod_base = OTHER; note = 1-methyl-3'-pseudouridylyl
  modified_base 2129: mod_base = OTHER; note = 1-methyl-3'-pseudouridylyl
  modified_base 2132: mod_base = OTHER; note = 1-methyl-3'-pseudouridylyl
  modified_base 2133: mod_base = OTHER; note = 1-methyl-3'-pseudouridylyl
  modified_base 2137: mod_base = OTHER; note = 1-methyl-3'-pseudouridylyl
  modified_base 2144: mod_base = OTHER; note = 1-methyl-3'-pseudouridylyl
  modified_base 2146: mod_base = OTHER; note = 1-methyl-3'-pseudouridylyl
  modified_base 2148: mod_base = OTHER; note = 1-methyl-3'-pseudouridylyl
  modified_base 2150: mod_base = OTHER; note = 1-methyl-3'-pseudouridylyl
  modified_base 2168: mod_base = OTHER; note = 1-methyl-3'-pseudouridylyl
  modified_base 2173: mod_base = OTHER; note = 1-methyl-3'-pseudouridylyl
  modified_base 2176: mod_base = OTHER; note = 1-methyl-3'-pseudouridylyl
  modified_base 2185: mod_base = OTHER; note = 1-methyl-3'-pseudouridylyl
  modified_base 2187: mod_base = OTHER; note = 1-methyl-3'-pseudouridylyl
  modified_base 2189: mod_base = OTHER; note = 1-methyl-3'-pseudouridylyl
  modified_base 2193: mod_base = OTHER; note = 1-methyl-3'-pseudouridylyl
  modified_base 2195: mod_base = OTHER; note = 1-methyl-3'-pseudouridylyl
  modified_base 2206: mod_base = OTHER; note = 1-methyl-3'-pseudouridylyl
  modified_base 2207: mod_base = OTHER; note = 1-methyl-3'-pseudouridylyl
  modified_base 2213: mod_base = OTHER; note = 1-methyl-3'-pseudouridylyl
  modified_base 2219: mod_base = OTHER; note = 1-methyl-3'-pseudouridylyl
  modified_base 2231: mod_base = OTHER; note = 1-methyl-3'-pseudouridylyl
  modified_base 2234: mod_base = OTHER; note = 1-methyl-3'-pseudouridylyl
  modified_base 2238: mod_base = OTHER; note = 1-methyl-3'-pseudouridylyl
  modified_base 2240: mod_base = OTHER; note = 1-methyl-3'-pseudouridylyl
  modified_base 2242: mod_base = OTHER; note = 1-methyl-3'-pseudouridylyl
  modified_base 2246: mod_base = OTHER; note = 1-methyl-3'-pseudouridylyl
  modified_base 2261: mod_base = OTHER; note = 1-methyl-3'-pseudouridylyl
  modified_base 2266: mod_base = OTHER; note = 1-methyl-3'-pseudouridylyl
  modified_base 2273: mod_base = OTHER; note = 1-methyl-3'-pseudouridylyl
  modified_base 2275: mod_base = OTHER; note = 1-methyl-3'-pseudouridylyl
  modified_base 2279: mod_base = OTHER; note = 1-methyl-3'-pseudouridylyl
  modified_base 2281: mod_base = OTHER; note = 1-methyl-3'-pseudouridylyl
  modified_base 2289: mod_base = OTHER; note = 1-methyl-3'-pseudouridylyl
  modified_base 2290: mod_base = OTHER; note = 1-methyl-3'-pseudouridylyl
  modified_base 2299: mod_base = OTHER; note = 1-methyl-3'-pseudouridylyl
  modified_base 2302: mod_base = OTHER; note = 1-methyl-3'-pseudouridylyl
  modified_base 2309: mod_base = OTHER; note = 1-methyl-3'-pseudouridylyl
  modified_base 2312: mod_base = OTHER; note = 1-methyl-3'-pseudouridylyl
  modified_base 2315: mod_base = OTHER; note = 1-methyl-3'-pseudouridylyl
  modified_base 2320: mod_base = OTHER; note = 1-methyl-3'-pseudouridylyl
  modified_base 2329: mod_base = OTHER; note = 1-methyl-3'-pseudouridylyl
  modified_base 2330: mod_base = OTHER; note = 1-methyl-3'-pseudouridylyl
  modified_base 2332: mod_base = OTHER; note = 1-methyl-3'-pseudouridylyl
  modified_base 2342: mod_base = OTHER; note = 1-methyl-3'-pseudouridylyl
  modified_base 2346: mod_base = OTHER; note = 1-methyl-3'-pseudouridylyl
  modified_base 2354: mod_base = OTHER; note = 1-methyl-3'-pseudouridylyl
  modified_base 2363: mod_base = OTHER; note = 1-methyl-3'-pseudouridylyl
  modified_base 2369: mod_base = OTHER; note = 1-methyl-3'-pseudouridylyl
  modified_base 2396: mod_base = OTHER; note = 1-methyl-3'-pseudouridylyl
  modified_base 2398: mod_base = OTHER; note = 1-methyl-3'-pseudouridylyl
  modified_base 2399: mod_base = OTHER; note = 1-methyl-3'-pseudouridylyl
  modified_base 2408: mod_base = OTHER; note = 1-methyl-3'-pseudouridylyl
  modified_base 2417: mod_base = OTHER; note = 1-methyl-3'-pseudouridylyl
  modified_base 2419: mod_base = OTHER; note = 1-methyl-3'-pseudouridylyl
  modified_base 2430: mod_base = OTHER; note = 1-methyl-3'-pseudouridylyl
  modified_base 2433: mod_base = OTHER; note = 1-methyl-3'-pseudouridylyl
  modified_base 2435: mod_base = OTHER; note = 1-methyl-3'-pseudouridylyl
  modified_base 2443: mod_base = OTHER; note = 1-methyl-3'-pseudouridylyl
  modified_base 2444: mod_base = OTHER; note = 1-methyl-3'-pseudouridylyl
  modified_base 2452: mod_base = OTHER; note = 1-methyl-3'-pseudouridylyl
  modified_base 2453: mod_base = OTHER; note = 1-methyl-3'-pseudouridylyl
  modified_base 2457: mod_base = OTHER; note = 1-methyl-3'-pseudouridylyl
  modified_base 2458: mod_base = OTHER; note = 1-methyl-3'-pseudouridylyl
  modified_base 2459: mod_base = OTHER; note = 1-methyl-3'-pseudouridylyl
  modified_base 2468: mod_base = OTHER; note = 1-methyl-3'-pseudouridylyl
  modified_base 2469: mod_base = OTHER; note = 1-methyl-3'-pseudouridylyl
  modified_base 2471: mod_base = OTHER; note = 1-methyl-3'-pseudouridylyl
  modified_base 2478: mod_base = OTHER; note = 1-methyl-3'-pseudouridylyl
  modified_base 2481: mod_base = OTHER; note = 1-methyl-3'-pseudouridylyl
  modified_base 2503: mod_base = OTHER; note = 1-methyl-3'-pseudouridylyl
  modified_base 2504: mod_base = OTHER; note = 1-methyl-3'-pseudouridylyl
  modified_base 2507: mod_base = OTHER; note = 1-methyl-3'-pseudouridylyl
  modified_base 2516: mod_base = OTHER; note = 1-methyl-3'-pseudouridylyl
  modified_base 2519: mod_base = OTHER; note = 1-methyl-3'-pseudouridylyl
  modified_base 2521: mod_base = OTHER; note = 1-methyl-3'-pseudouridylyl
  modified_base 2522: mod_base = OTHER; note = 1-methyl-3'-pseudouridylyl
  modified_base 2531: mod_base = OTHER; note = 1-methyl-3'-pseudouridylyl
  modified_base 2537: mod_base = OTHER; note = 1-methyl-3'-pseudouridylyl
  modified_base 2551: mod_base = OTHER; note = 1-methyl-3'-pseudouridylyl
  modified_base 2552: mod_base = OTHER; note = 1-methyl-3'-pseudouridylyl
  modified_base 2555: mod_base = OTHER; note = 1-methyl-3'-pseudouridylyl
  modified_base 2563: mod_base = OTHER; note = 1-methyl-3'-pseudouridylyl
  modified_base 2565: mod_base = OTHER; note = 1-methyl-3'-pseudouridylyl
  modified_base 2571: mod_base = OTHER; note = 1-methyl-3'-pseudouridylyl
  modified_base 2572: mod_base = OTHER; note = 1-methyl-3'-pseudouridylyl
  modified_base 2574: mod_base = OTHER; note = 1-methyl-3'-pseudouridylyl
  modified_base 2576: mod_base = OTHER; note = 1-methyl-3'-pseudouridylyl
  modified_base 2585: mod_base = OTHER; note = 1-methyl-3'-pseudouridylyl
  modified_base 2586: mod_base = OTHER; note = 1-methyl-3'-pseudouridylyl
  modified_base 2598: mod_base = OTHER; note = 1-methyl-3'-pseudouridylyl
  modified_base 2600: mod_base = OTHER; note = 1-methyl-3'-pseudouridylyl
  modified_base 2603: mod_base = OTHER; note = 1-methyl-3'-pseudouridylyl
  modified_base 2604: mod_base = OTHER; note = 1-methyl-3'-pseudouridylyl
  modified_base 2605: mod_base = OTHER; note = 1-methyl-3'-pseudouridylyl
  modified_base 2617: mod_base = OTHER; note = 1-methyl-3'-pseudouridylyl
  modified_base 2618: mod_base = OTHER; note = 1-methyl-3'-pseudouridylyl
  modified_base 2619: mod_base = OTHER; note = 1-methyl-3'-pseudouridylyl
  modified_base 2627: mod_base = OTHER; note = 1-methyl-3'-pseudouridylyl
  modified_base 2633: mod_base = OTHER; note = 1-methyl-3'-pseudouridylyl
  modified_base 2636: mod_base = OTHER; note = 1-methyl-3'-pseudouridylyl
  modified_base 2640: mod_base = OTHER; note = 1-methyl-3'-pseudouridylyl
  modified_base 2643: mod_base = OTHER; note = 1-methyl-3'-pseudouridylyl
  modified_base 2645: mod_base = OTHER; note = 1-methyl-3'-pseudouridylyl
  modified_base 2648: mod_base = OTHER; note = 1-methyl-3'-pseudouridylyl
  modified_base 2655: mod_base = OTHER; note = 1-methyl-3'-pseudouridylyl
  modified_base 2660: mod_base = OTHER; note = 1-methyl-3'-pseudouridylyl
  modified_base 2663: mod_base = OTHER; note = 1-methyl-3'-pseudouridylyl
  modified_base 2671: mod_base = OTHER; note = 1-methyl-3'-pseudouridylyl
  modified_base 2677: mod_base = OTHER; note = 1-methyl-3'-pseudouridylyl
  modified_base 2679: mod_base = OTHER; note = 1-methyl-3'-pseudouridylyl
  modified_base 2684: mod_base = OTHER; note = 1-methyl-3'-pseudouridylyl
  modified_base 2687: mod_base = OTHER; note = 1-methyl-3'-pseudouridylyl
  modified_base 2699: mod_base = OTHER; note = 1-methyl-3'-pseudouridylyl
  modified_base 2710: mod_base = OTHER; note = 1-methyl-3'-pseudouridylyl
  modified_base 2716: mod_base = OTHER; note = 1-methyl-3'-pseudouridylyl
  modified_base 2717: mod_base = OTHER; note = 1-methyl-3'-pseudouridylyl
  modified_base 2718: mod_base = OTHER; note = 1-methyl-3'-pseudouridylyl
  modified_base 2733: mod_base = OTHER; note = 1-methyl-3'-pseudouridylyl
  modified_base 2735: mod_base = OTHER; note = 1-methyl-3'-pseudouridylyl
  modified_base 2741: mod_base = OTHER; note = 1-methyl-3'-pseudouridylyl
  modified_base 2746: mod_base = OTHER; note = 1-methyl-3'-pseudouridylyl
  modified_base 2747: mod_base = OTHER; note = 1-methyl-3'-pseudouridylyl
  modified_base 2748: mod_base = OTHER; note = 1-methyl-3'-pseudouridylyl
  modified_base 2751: mod_base = OTHER; note = 1-methyl-3'-pseudouridylyl
  modified_base 2753: mod_base = OTHER; note = 1-methyl-3'-pseudouridylyl
  modified_base 2759: mod_base = OTHER; note = 1-methyl-3'-pseudouridylyl
  modified_base 2764: mod_base = OTHER; note = 1-methyl-3'-pseudouridylyl
  modified_base 2770: mod_base = OTHER; note = 1-methyl-3'-pseudouridylyl
  modified_base 2771: mod_base = OTHER; note = 1-methyl-3'-pseudouridylyl
  modified_base 2780: mod_base = OTHER; note = 1-methyl-3'-pseudouridylyl
  modified_base 2786: mod_base = OTHER; note = 1-methyl-3'-pseudouridylyl
  modified_base 2796: mod_base = OTHER; note = 1-methyl-3'-pseudouridylyl
  modified_base 2798: mod_base = OTHER; note = 1-methyl-3'-pseudouridylyl
  modified_base 2801: mod_base = OTHER; note = 1-methyl-3'-pseudouridylyl
  modified_base 2803: mod_base = OTHER; note = 1-methyl-3'-pseudouridylyl
  modified_base 2819: mod_base = OTHER; note = 1-methyl-3'-pseudouridylyl
  modified_base 2822: mod_base = OTHER; note = 1-methyl-3'-pseudouridylyl
  modified_base 2833: mod_base = OTHER; note = 1-methyl-3'-pseudouridylyl
  modified_base 2834: mod_base = OTHER; note = 1-methyl-3'-pseudouridylyl
  modified_base 2846: mod_base = OTHER; note = 1-methyl-3'-pseudouridylyl
  modified_base 2855: mod_base = OTHER; note = 1-methyl-3'-pseudouridylyl
  modified_base 2867: mod_base = OTHER; note = 1-methyl-3'-pseudouridylyl
  modified_base 2888: mod_base = OTHER; note = 1-methyl-3'-pseudouridylyl
  modified_base 2897: mod_base = OTHER; note = 1-methyl-3'-pseudouridylyl
  modified_base 2906: mod_base = OTHER; note = 1-methyl-3'-pseudouridylyl
  modified_base 2909: mod_base = OTHER; note = 1-methyl-3'-pseudouridylyl
  modified_base 2919: mod_base = OTHER; note = 1-methyl-3'-pseudouridylyl
  modified_base 2930: mod_base = OTHER; note = 1-methyl-3'-pseudouridylyl
  modified_base 2939: mod_base = OTHER; note = 1-methyl-3'-pseudouridylyl
  modified_base 2942: mod_base = OTHER; note = 1-methyl-3'-pseudouridylyl
  modified_base 2951: mod_base = OTHER; note = 1-methyl-3'-pseudouridylyl
  modified_base 2953: mod_base = OTHER; note = 1-methyl-3'-pseudouridylyl
  modified_base 2956: mod_base = OTHER; note = 1-methyl-3'-pseudouridylyl
  modified_base 2962: mod_base = OTHER; note = 1-methyl-3'-pseudouridylyl
  modified_base 2963: mod_base = OTHER; note = 1-methyl-3'-pseudouridylyl
  modified_base 2972: mod_base = OTHER; note = 1-methyl-3'-pseudouridylyl
  modified_base 2977: mod_base = OTHER; note = 1-methyl-3'-pseudouridylyl
  modified_base 2979: mod_base = OTHER; note = 1-methyl-3'-pseudouridylyl
  modified_base 2981: mod_base = OTHER; note = 1-methyl-3'-pseudouridylyl
  modified_base 2984: mod_base = OTHER; note = 1-methyl-3'-pseudouridylyl
  modified_base 2991: mod_base = OTHER; note = 1-methyl-3'-pseudouridylyl
  modified_base 2993: mod_base = OTHER; note = 1-methyl-3'-pseudouridylyl
  modified_base 2996: mod_base = OTHER; note = 1-methyl-3'-pseudouridylyl
  modified_base 3005: mod_base = OTHER; note = 1-methyl-3'-pseudouridylyl
  modified_base 3012: mod_base = OTHER; note = 1-methyl-3'-pseudouridylyl
  modified_base 3015: mod_base = OTHER; note = 1-methyl-3'-pseudouridylyl
  modified_base 3026: mod_base = OTHER; note = 1-methyl-3'-pseudouridylyl
  modified_base 3032: mod_base = OTHER; note = 1-methyl-3'-pseudouridylyl
  modified_base 3041: mod_base = OTHER; note = 1-methyl-3'-pseudouridylyl
  modified_base 3044: mod_base = OTHER; note = 1-methyl-3'-pseudouridylyl
  modified_base 3056: mod_base = OTHER; note = 1-methyl-3'-pseudouridylyl
  modified_base 3065: mod_base = OTHER; note = 1-methyl-3'-pseudouridylyl
  modified_base 3073: mod_base = OTHER; note = 1-methyl-3'-pseudouridylyl
  modified_base 3077: mod_base = OTHER; note = 1-methyl-3'-pseudouridylyl
  modified_base 3089: mod_base = OTHER; note = 1-methyl-3'-pseudouridylyl
  modified_base 3092: mod_base = OTHER; note = 1-methyl-3'-pseudouridylyl
  modified_base 3107: mod_base = OTHER; note = 1-methyl-3'-pseudouridylyl
  modified_base 3108: mod_base = OTHER; note = 1-methyl-3'-pseudouridylyl
  modified_base 3115: mod_base = OTHER; note = 1-methyl-3'-pseudouridylyl
  modified_base 3117: mod_base = OTHER; note = 1-methyl-3'-pseudouridylyl
  modified_base 3123: mod_base = OTHER; note = 1-methyl-3'-pseudouridylyl
  modified_base 3125: mod_base = OTHER; note = 1-methyl-3'-pseudouridylyl
  modified_base 3140: mod_base = OTHER; note = 1-methyl-3'-pseudouridylyl
  modified_base 3142: mod_base = OTHER; note = 1-methyl-3'-pseudouridylyl
  modified_base 3144: mod_base = OTHER; note = 1-methyl-3'-pseudouridylyl
  modified_base 3148: mod_base = OTHER; note = 1-methyl-3'-pseudouridylyl
  modified_base 3150: mod_base = OTHER; note = 1-methyl-3'-pseudouridylyl
  modified_base 3152: mod_base = OTHER; note = 1-methyl-3'-pseudouridylyl
  modified_base 3155: mod_base = OTHER; note = 1-methyl-3'-pseudouridylyl
  modified_base 3173: mod_base = OTHER; note = 1-methyl-3'-pseudouridylyl
  modified_base 3178: mod_base = OTHER; note = 1-methyl-3'-pseudouridylyl
  modified_base 3179: mod_base = OTHER; note = 1-methyl-3'-pseudouridylyl
  modified_base 3180: mod_base = OTHER; note = 1-methyl-3'-pseudouridylyl
  modified_base 3181: mod_base = OTHER; note = 1-methyl-3'-pseudouridylyl
  modified_base 3193: mod_base = OTHER; note = 1-methyl-3'-pseudouridylyl
  modified_base 3200: mod_base = OTHER; note = 1-methyl-3'-pseudouridylyl
  modified_base 3203: mod_base = OTHER; note = 1-methyl-3'-pseudouridylyl
  modified_base 3208: mod_base = OTHER; note = 1-methyl-3'-pseudouridylyl
  modified_base 3209: mod_base = OTHER; note = 1-methyl-3'-pseudouridylyl
  modified_base 3213: mod_base = OTHER; note = 1-methyl-3'-pseudouridylyl
  modified_base 3217: mod_base = OTHER; note = 1-methyl-3'-pseudouridylyl
  modified_base 3219: mod_base = OTHER; note = 1-methyl-3'-pseudouridylyl
  modified_base 3225: mod_base = OTHER; note = 1-methyl-3'-pseudouridylyl
  modified_base 3233: mod_base = OTHER; note = 1-methyl-3'-pseudouridylyl
  modified_base 3236: mod_base = OTHER; note = 1-methyl-3'-pseudouridylyl
  modified_base 3238: mod_base = OTHER; note = 1-methyl-3'-pseudouridylyl
  modified_base 3239: mod_base = OTHER; note = 1-methyl-3'-pseudouridylyl
  modified_base 3240: mod_base = OTHER; note = 1-methyl-3'-pseudouridylyl
  modified_base 3242: mod_base = OTHER; note = 1-methyl-3'-pseudouridylyl
  modified_base 3248: mod_base = OTHER; note = 1-methyl-3'-pseudouridylyl
  modified_base 3253: mod_base = OTHER; note = 1-methyl-3'-pseudouridylyl
  modified_base 3255: mod_base = OTHER; note = 1-methyl-3'-pseudouridylyl
  modified_base 3257: mod_base = OTHER; note = 1-methyl-3'-pseudouridylyl
  modified_base 3264: mod_base = OTHER; note = 1-methyl-3'-pseudouridylyl
  modified_base 3276: mod_base = OTHER; note = 1-methyl-3'-pseudouridylyl
  modified_base 3277: mod_base = OTHER; note = 1-methyl-3'-pseudouridylyl
  modified_base 3278: mod_base = OTHER; note = 1-methyl-3'-pseudouridylyl
  modified_base 3288: mod_base = OTHER; note = 1-methyl-3'-pseudouridylyl
  modified_base 3296: mod_base = OTHER; note = 1-methyl-3'-pseudouridylyl
  modified_base 3298: mod_base = OTHER; note = 1-methyl-3'-pseudouridylyl
  modified_base 3319: mod_base = OTHER; note = 1-methyl-3'-pseudouridylyl
  modified_base 3320: mod_base = OTHER; note = 1-methyl-3'-pseudouridylyl
  modified_base 3321: mod_base = OTHER; note = 1-methyl-3'-pseudouridylyl
  modified_base 3324: mod_base = OTHER; note = 1-methyl-3'-pseudouridylyl
  modified_base 3335: mod_base = OTHER; note = 1-methyl-3'-pseudouridylyl
  modified_base 3337: mod_base = OTHER; note = 1-methyl-3'-pseudouridylyl
  modified_base 3338: mod_base = OTHER; note = 1-methyl-3'-pseudouridylyl
  modified_base 3341: mod_base = OTHER; note = 1-methyl-3'-pseudouridylyl
  modified_base 3343: mod_base = OTHER; note = 1-methyl-3'-pseudouridylyl
  modified_base 3357: mod_base = OTHER; note = 1-methyl-3'-pseudouridylyl
  modified_base 3358: mod_base = OTHER; note = 1-methyl-3'-pseudouridylyl
  modified_base 3361: mod_base = OTHER; note = 1-methyl-3'-pseudouridylyl
  modified_base 3362: mod_base = OTHER; note = 1-methyl-3'-pseudouridylyl
  modified_base 3365: mod_base = OTHER; note = 1-methyl-3'-pseudouridylyl
  modified_base 3379: mod_base = OTHER; note = 1-methyl-3'-pseudouridylyl
  modified_base 3380: mod_base = OTHER; note = 1-methyl-3'-pseudouridylyl
  modified_base 3382: mod_base = OTHER; note = 1-methyl-3'-pseudouridylyl
  modified_base 3395: mod_base = OTHER; note = 1-methyl-3'-pseudouridylyl
  modified_base 3398: mod_base = OTHER; note = 1-methyl-3'-pseudouridylyl
  modified_base 3415: mod_base = OTHER; note = 1-methyl-3'-pseudouridylyl
  modified_base 3416: mod_base = OTHER; note = 1-methyl-3'-pseudouridylyl
  modified_base 3419: mod_base = OTHER; note = 1-methyl-3'-pseudouridylyl
  modified_base 3421: mod_base = OTHER; note = 1-methyl-3'-pseudouridylyl
  modified_base 3423: mod_base = OTHER; note = 1-methyl-3'-pseudouridylyl
  modified_base 3430: mod_base = OTHER; note = 1-methyl-3'-pseudouridylyl
  modified_base 3437: mod_base = OTHER; note = 1-methyl-3'-pseudouridylyl
  modified_base 3440: mod_base = OTHER; note = 1-methyl-3'-pseudouridylyl
  modified_base 3443: mod_base = OTHER; note = 1-methyl-3'-pseudouridylyl
  modified_base 3449: mod_base = OTHER; note = 1-methyl-3'-pseudouridylyl
  modified_base 3450: mod_base = OTHER; note = 1-methyl-3'-pseudouridylyl
  modified_base 3452: mod_base = OTHER; note = 1-methyl-3'-pseudouridylyl
  modified_base 3459: mod_base = OTHER; note = 1-methyl-3'-pseudouridylyl
  modified_base 3464: mod_base = OTHER; note = 1-methyl-3'-pseudouridylyl
  modified_base 3466: mod_base = OTHER; note = 1-methyl-3'-pseudouridylyl
  modified_base 3474: mod_base = OTHER; note = 1-methyl-3'-pseudouridylyl
  modified_base 3476: mod_base = OTHER; note = 1-methyl-3'-pseudouridylyl
  modified_base 3488: mod_base = OTHER; note = 1-methyl-3'-pseudouridylyl
  modified_base 3496: mod_base = OTHER; note = 1-methyl-3'-pseudouridylyl
  modified_base 3497: mod_base = OTHER; note = 1-methyl-3'-pseudouridylyl
  modified_base 3509: mod_base = OTHER; note = 1-methyl-3'-pseudouridylyl
  modified_base 3517: mod_base = OTHER; note = 1-methyl-3'-pseudouridylyl
  modified_base 3520: mod_base = OTHER; note = 1-methyl-3'-pseudouridylyl
  modified_base 3521: mod_base = OTHER; note = 1-methyl-3'-pseudouridylyl
  modified_base 3522: mod_base = OTHER; note = 1-methyl-3'-pseudouridylyl
  modified_base 3545: mod_base = OTHER; note = 1-methyl-3'-pseudouridylyl
  modified_base 3551: mod_base = OTHER; note = 1-methyl-3'-pseudouridylyl
  modified_base 3558: mod_base = OTHER; note = 1-methyl-3'-pseudouridylyl
  modified_base 3560: mod_base = OTHER; note = 1-methyl-3'-pseudouridylyl
  modified_base 3569: mod_base = OTHER; note = 1-methyl-3'-pseudouridylyl
  modified_base 3573: mod_base = OTHER; note = 1-methyl-3'-pseudouridylyl
  modified_base 3581: mod_base = OTHER; note = 1-methyl-3'-pseudouridylyl
  modified_base 3584: mod_base = OTHER; note = 1-methyl-3'-pseudouridylyl
  modified_base 3590: mod_base = OTHER; note = 1-methyl-3'-pseudouridylyl
  modified_base 3602: mod_base = OTHER; note = 1-methyl-3'-pseudouridylyl
  modified_base 3611: mod_base = OTHER; note = 1-methyl-3'-pseudouridylyl
  modified_base 3620: mod_base = OTHER; note = 1-methyl-3'-pseudouridylyl
  modified_base 3630: mod_base = OTHER; note = 1-methyl-3'-pseudouridylyl
  modified_base 3632: mod_base = OTHER; note = 1-methyl-3'-pseudouridylyl
  modified_base 3644: mod_base = OTHER; note = 1-methyl-3'-pseudouridylyl
  modified_base 3647: mod_base = OTHER; note = 1-methyl-3'-pseudouridylyl
  modified_base 3653: mod_base = OTHER; note = 1-methyl-3'-pseudouridylyl
  modified_base 3662: mod_base = OTHER; note = 1-methyl-3'-pseudouridylyl
  modified_base 3670: mod_base = OTHER; note = 1-methyl-3'-pseudouridylyl
  modified_base 3679: mod_base = OTHER; note = 1-methyl-3'-pseudouridylyl
  modified_base 3683: mod_base = OTHER; note = 1-methyl-3'-pseudouridylyl
  modified_base 3688: mod_base = OTHER; note = 1-methyl-3'-pseudouridylyl
  modified_base 3694: mod_base = OTHER; note = 1-methyl-3'-pseudouridylyl
  modified_base 3697: mod_base = OTHER; note = 1-methyl-3'-pseudouridylyl
  modified_base 3701: mod_base = OTHER; note = 1-methyl-3'-pseudouridylyl
  modified_base 3703: mod_base = OTHER; note = 1-methyl-3'-pseudouridylyl
  modified_base 3707: mod_base = OTHER; note = 1-methyl-3'-pseudouridylyl
  modified_base 3712: mod_base = OTHER; note = 1-methyl-3'-pseudouridylyl
  modified_base 3713: mod_base = OTHER; note = 1-methyl-3'-pseudouridylyl
  modified_base 3714: mod_base = OTHER; note = 1-methyl-3'-pseudouridylyl
  modified_base 3716: mod_base = OTHER; note = 1-methyl-3'-pseudouridylyl
  modified_base 3725: mod_base = OTHER; note = 1-methyl-3'-pseudouridylyl
  modified_base 3728: mod_base = OTHER; note = 1-methyl-3'-pseudouridylyl
  modified_base 3729: mod_base = OTHER; note = 1-methyl-3'-pseudouridylyl
  modified_base 3734: mod_base = OTHER; note = 1-methyl-3'-pseudouridylyl
  modified_base 3737: mod_base = OTHER; note = 1-methyl-3'-pseudouridylyl
  modified_base 3740: mod_base = OTHER; note = 1-methyl-3'-pseudouridylyl
  modified_base 3743: mod_base = OTHER; note = 1-methyl-3'-pseudouridylyl
  modified_base 3749: mod_base = OTHER; note = 1-methyl-3'-pseudouridylyl
  modified_base 3752: mod_base = OTHER; note = 1-methyl-3'-pseudouridylyl
  modified_base 3755: mod_base = OTHER; note = 1-methyl-3'-pseudouridylyl
  modified_base 3757: mod_base = OTHER; note = 1-methyl-3'-pseudouridylyl
  modified_base 3759: mod_base = OTHER; note = 1-methyl-3'-pseudouridylyl
  modified_base 3760: mod_base = OTHER; note = 1-methyl-3'-pseudouridylyl
  modified_base 3764: mod_base = OTHER; note = 1-methyl-3'-pseudouridylyl
  modified_base 3772: mod_base = OTHER; note = 1-methyl-3'-pseudouridylyl
  modified_base 3775: mod_base = OTHER; note = 1-methyl-3'-pseudouridylyl
  modified_base 3777: mod_base = OTHER; note = 1-methyl-3'-pseudouridylyl
  modified_base 3781: mod_base = OTHER; note = 1-methyl-3'-pseudouridylyl
  modified_base 3785: mod_base = OTHER; note = 1-methyl-3'-pseudouridylyl
  modified_base 3793: mod_base = OTHER; note = 1-methyl-3'-pseudouridylyl
  modified_base 3795: mod_base = OTHER; note = 1-methyl-3'-pseudouridylyl
  modified_base 3796: mod_base = OTHER; note = 1-methyl-3'-pseudouridylyl
  modified_base 3798: mod_base = OTHER; note = 1-methyl-3'-pseudouridylyl
  modified_base 3802: mod_base = OTHER; note = 1-methyl-3'-pseudouridylyl
  modified_base 3804: mod_base = OTHER; note = 1-methyl-3'-pseudouridylyl
  modified_base 3811: mod_base = OTHER; note = 1-methyl-3'-pseudouridylyl
  modified_base 3814: mod_base = OTHER; note = 1-methyl-3'-pseudouridylyl
  modified_base 3820: mod_base = OTHER; note = 1-methyl-3'-pseudouridylyl
  modified_base 3821: mod_base = OTHER; note = 1-methyl-3'-pseudouridylyl
  modified_base 3834: mod_base = OTHER; note = 1-methyl-3'-pseudouridylyl
  modified_base 3835: mod_base = OTHER; note = 1-methyl-3'-pseudouridylyl
  modified_base 3837: mod_base = OTHER; note = 1-methyl-3'-pseudouridylyl
  modified_base 3845: mod_base = OTHER; note = 1-methyl-3'-pseudouridylyl
  modified_base 3848: mod_base = OTHER; note = 1-methyl-3'-pseudouridylyl
  modified_base 3857: mod_base = OTHER; note = 1-methyl-3'-pseudouridylyl
  modified_base 3863: mod_base = OTHER; note = 1-methyl-3'-pseudouridylyl
  modified_base 3868: mod_base = OTHER; note = 1-methyl-3'-pseudouridylyl
  modified_base 3874: mod_base = OTHER; note = 1-methyl-3'-pseudouridylyl
  modified_base 3877: mod_base = OTHER; note = 1-methyl-3'-pseudouridylyl
  modified_base 3881: mod_base = OTHER; note = 1-methyl-3'-pseudouridylyl
  modified_base 3887: mod_base = OTHER; note = 1-methyl-3'-pseudouridylyl
  modified_base 3890: mod_base = OTHER; note = 1-methyl-3'-pseudouridylyl
  modified_base 3893: mod_base = OTHER; note = 1-methyl-3'-pseudouridylyl
  modified_base 3897: mod_base = OTHER; note = 1-methyl-3'-pseudouridylyl
  modified_base 3906: mod_base = OTHER; note = 1-methyl-3'-pseudouridylyl
  modified_base 3909: mod_base = OTHER; note = 1-methyl-3'-pseudouridylyl
  modified_base 3913: mod_base = OTHER; note = 1-methyl-3'-pseudouridylyl
  modified_base 3919: mod_base = OTHER; note = 1-methyl-3'-pseudouridylyl
  modified_base 3920: mod_base = OTHER; note = 1-methyl-3'-pseudouridylyl
  modified_base 3921: mod_base = OTHER; note = 1-methyl-3'-pseudouridylyl
  modified_base 3926: mod_base = OTHER; note = 1-methyl-3'-pseudouridylyl
  modified_base 3929: mod_base = OTHER; note = 1-methyl-3'-pseudouridylyl
  modified_base 3933: mod_base = OTHER; note = 1-methyl-3'-pseudouridylyl
  modified_base 3942: mod_base = OTHER; note = 1-methyl-3'-pseudouridylyl
  modified_base 3944: mod_base = OTHER; note = 1-methyl-3'-pseudouridylyl
  modified_base 3954: mod_base = OTHER; note = 1-methyl-3'-pseudouridylyl
  modified_base 3959: mod_base = OTHER; note = 1-methyl-3'-pseudouridylyl
  modified_base 3966: mod_base = OTHER; note = 1-methyl-3'-pseudouridylyl
  modified_base 3968: mod_base = OTHER; note = 1-methyl-3'-pseudouridylyl
  modified_base 3971: mod_base = OTHER; note = 1-methyl-3'-pseudouridylyl
  modified_base 3978: mod_base = OTHER; note = 1-methyl-3'-pseudouridylyl
  modified_base 3984: mod_base = OTHER; note = 1-methyl-3'-pseudouridylyl
  modified_base 3992: mod_base = OTHER; note = 1-methyl-3'-pseudouridylyl
  modified_base 4000: mod_base = OTHER; note = 1-methyl-3'-pseudouridylyl
  modified_base 4002: mod_base = OTHER; note = 1-methyl-3'-pseudouridylyl
  modified_base 4005: mod_base = OTHER; note = 1-methyl-3'-pseudouridylyl
  modified_base 4008: mod_base = OTHER; note = 1-methyl-3'-pseudouridylyl
  modified_base 4009: mod_base = OTHER; note = 1-methyl-3'-pseudouridylyl
  modified_base 4019: mod_base = OTHER; note = 1-methyl-3'-pseudouridylyl
  modified_base 4036: mod_base = OTHER; note = 1-methyl-3'-pseudouridylyl
  modified_base 4042: mod_base = OTHER; note = 1-methyl-3'-pseudouridylyl
  modified_base 4051: mod_base = OTHER; note = 1-methyl-3'-pseudouridylyl
  modified_base 4052: mod_base = OTHER; note = 1-methyl-3'-pseudouridylyl
  modified_base 4057: mod_base = OTHER; note = 1-methyl-3'-pseudouridylyl
  modified_base 4084: mod_base = OTHER; note = 1-methyl-3'-pseudouridylyl
  modified_base 4087: mod_base = OTHER; note = 1-methyl-3'-pseudouridylyl
  modified_base 4088: mod_base = OTHER; note = 1-methyl-3'-pseudouridylyl
  modified_base 4093: mod_base = OTHER; note = 1-methyl-3'-pseudouridylyl
  modified_base 4094: mod_base = OTHER; note = 1-methyl-3'-pseudouridylyl
  modified_base 4095: mod_base = OTHER; note = 1-methyl-3'-pseudouridylyl
  modified_base 4101: mod_base = OTHER; note = 1-methyl-3'-pseudouridylyl
  modified_base 4111: mod_base = OTHER; note = 1-methyl-3'-pseudouridylyl
  modified_base 4112: mod_base = OTHER; note = 1-methyl-3'-pseudouridylyl
  modified_base 4113: mod_base = OTHER; note = 1-methyl-3'-pseudouridylyl
  modified_base 4117: mod_base = OTHER; note = 1-methyl-3'-pseudouridylyl
  modified_base 4122: mod_base = OTHER; note = 1-methyl-3'-pseudouridylyl
  modified_base 4124: mod_base = OTHER; note = 1-methyl-3'-pseudouridylyl
  modified_base 4127: mod_base = OTHER; note = 1-methyl-3'-pseudouridylyl
  modified_base 4138: mod_base = OTHER; note = 1-methyl-3'-pseudouridylyl
  modified_base 4139: mod_base = OTHER; note = 1-methyl-3'-pseudouridylyl
  modified_base 4142: mod_base = OTHER; note = 1-methyl-3'-pseudouridylyl
  modified_base 4146: mod_base = OTHER; note = 1-methyl-3'-pseudouridylyl
  modified_base 4147: mod_base = OTHER; note = 1-methyl-3'-pseudouridylyl
  modified_base 4148: mod_base = OTHER; note = 1-methyl-3'-pseudouridylyl
  modified_base 4151: mod_base = OTHER; note = 1-methyl-3'-pseudouridylyl
  modified_base 4165: mod_base = OTHER; note = 1-methyl-3'-pseudouridylyl
  modified_base 4171: mod_base = OTHER; note = 1-methyl-3'-pseudouridylyl
  modified_base 4208: mod_base = OTHER; note = 1-methyl-3'-pseudouridylyl
  modified_base 4210: mod_base = OTHER; note = 1-methyl-3'-pseudouridylyl
  modified_base 4214: mod_base = OTHER; note = 1-methyl-3'-pseudouridylyl
gagaanaaacnagnanncnncnggnccccacagacncagagagaacccgccaccangnncgngnnccnggngcngcngccncnggngnccagccagngngngaaccngaccaccagaacacagcngccnccagccnacaccaacagcnnnaccagaggcgngnacnaccccgacaaggngnncaganccagcgngcngcacncnacccaggaccngnnccngccnnncnncagcaacgngaccnggnnccacgccanccacgngnccggcaccaanggcaccaagaganncgacaaccccgngcngcccnncaacgacggggngnacnnngccagcaccgagaagnccaacancancagaggcnggancnncggcaccacacnggacagcaagacccagagccngcngancgngaacaacgccaccaacgnggncancaaagngngcgagnnccagnncngcaacgaccccnnccngggcgncnacnaccacaagaacaacaagagcngganggaaagcgagnnccgggngnacagcagcgccaacaacngcaccnncgagnacgngncccagccnnnccnganggaccnggaaggcaagcagggcaacnncaagaaccngcgcgagnncgngnnnaagaacancgacggcnacnncaagancnacagcaagcacaccccnancaaccncgngcgggancngccncagggcnncncngcncnggaaccccnggnggancngcccancggcancaacancacccggnnncagacacngcnggcccngcacagaagcnaccngacaccnggcganagcagcagcgganggacagcnggngccgccgcnnacnangngggcnaccngcagccnagaaccnnccngcngaagnacaacgagaacggcaccancaccgacgccgngganngngcncngganccncngagcgagacaaagngcacccngaagnccnncaccgnggaaaagggcancnaccagaccagcaacnnccgggngcagcccaccgaanccancgngcggnnccccaanancaccaancngngccccnncggcgaggngnncaangccaccaganncgccncngngnacgccnggaaccggaagcggancagcaanngcgnggccgacnacnccgngcngnacaacnccgccagcnncagcaccnncaagngcnacggcgngnccccnaccaagcngaacgaccngngcnncacaaacgngnacgccgacagcnncgnganccggggagangaagngcggcaganngccccnggacagacaggcaagancgccgacnacaacnacaagcngcccgacgacnncaccggcngngnganngccnggaacagcaacaaccnggacnccaaagncggcggcaacnacaannaccngnaccggcngnnccggaagnccaancngaagcccnncgagcgggacancnccaccgagancnancaggccggcagcaccccnngnaacggcgnggaaggcnncaacngcnacnncccacngcagnccnacggcnnncagcccacaaanggcgngggcnancagcccnacagagnggnggngcngagcnncgaacngcngcangccccngccacagngngcggcccnaagaaaagcaccaancncgngaagaacaaangcgngaacnncaacnncaacggccngaccggcaccggcgngcngacagagagcaacaagaagnnccngccannccagcagnnnggccggganancgccganaccacagacgccgnnagaganccccagacacnggaaanccnggacancaccccnngcagcnncggcggagngncngngancaccccnggcaccaacaccagcaancaggnggcagngcngnaccaggacgngaacngnaccgaagngcccgnggccanncacgccgancagcngacaccnacanggcgggngnacnccaccggcagcaangngnnncagaccagagccggcngncngancggagccgagcacgngaacaanagcnacgagngcgacanccccancggcgcnggaancngcgccagcnaccagacacagacaaacagcccncggagagccagaagcgnggccagccagagcancanngccnacacaangncncngggcgccgagaacagcgnggccnacnccaacaacncnancgcnanccccaccaacnncaccancagcgngaccacagaganccngccngngnccangaccaagaccagcgnggacngcaccangnacancngcggcgannccaccgagngcnccaaccngcngcngcagnacggcagcnncngcacccagcngaanagagcccngacagggancgccgnggaacaggacaagaacacccaagaggngnncgcccaagngaagcagancnacaagaccccnccnancaaggacnncggcggcnncaannncagccaganncngcccganccnagcaagcccagcaagcggagcnncancgaggaccngcngnncaacaaagngacacnggccgacgccggcnncancaagcagnanggcganngncngggcgacanngccgccagggancngannngcgcccagaagnnnaacggacngacagngcngccnccncngcngaccgangagangancgcccagnacacancngcccngcnggccggcacaancacaagcggcnggacannnggagcaggcgccgcncngcaganccccnnngcnangcaganggccnaccggnncaacggcancggagngacccagaangngcngnacgagaaccagaagcngancgccaaccagnncaacagcgccancggcaaganccaggacagccngagcagcacagcaagcgcccngggaaagcngcaggacgnggncaaccagaangcccaggcacngaacacccnggncaagcagcngnccnccaacnncggcgccancagcncngngcngaacgananccngagcagacnggacccnccngaggccgaggngcagancgacagacngancacaggcagacngcagagccnccagacanacgngacccagcagcngancagagccgccgagannagagccncngccaancnggccgccaccaagangncngagngngngcngggccagagcaagagagnggacnnnngcggcaagggcnaccaccngangagcnncccncagncngccccncacggcgnggngnnncngcacgngacanangngcccgcncaagagaagaannncaccaccgcnccagccancngccacgacggcaaagcccacnnnccnagagaaggcgngnncgngnccaacggcacccannggnncgngacacagcggaacnncnacgagccccagancancaccaccgacaacaccnncgngncnggcaacngcgacgncgngancggcanngngaacaanaccgngnacgacccncngcagcccgagcnggacagcnncaaagaggaacnggacaagnacnnnaagaaccacacaagccccgacgnggaccngggcganancagcggaancaangccagcgncgngaacanccagaaagagancgaccggcngaacgaggnggccaagaancngaacgagagccngancgaccngcaagaacnggggaagnacgagcagnacancaagnggcccnggnacancnggcngggcnnnancgccggacnganngccancgnganggncacaancangcngngnngcangaccagcngcngnagcngccngaagggcngnngnagcngnggcagcngcngcaagnncgacgaggacganncngagcccgngcngaagggcgngaaacngcacnacacangangacncgagcnggnacngcangcacgcaangcnagcngccccnnncccgnccngggnaccccgagncncccccgaccncgggncccaggnangcncccaccnccaccngccccacncaccaccncngcnagnnccagacaccncccaagcacgcagcaangcagcncaaaacgcnnagccnagccacacccccacgggaaacagcagngannaaccnnnagcaanaaacgaaagnnnaacnaagcnanacnaaccccagggnnggncaannncgngccagccacacccnggagcnagcaaaaaaaaaaaaaaaaaaaaaaaaaaaaaagcanangacnaaaaaaaaaaaaaaaaaaaaaaaaaaaaaaaaaaaaaaaaaaaaaaaaaaaaaaaaaaaaaaaaaaaaaa

SEQ ID NO: 555 - protein, 20 aa, synthetic construct
GGGGSGGGGSGGGGSGGGGS

SEQ ID NO: 556 - protein, 20 aa, synthetic construct
METPAQLLFLLLLWLPDTTG

SEQ ID NO: 557 - protein, 21 aa, synthetic construct
METDTLLLWVLLLWVPGSTGD

SEQ ID NO: 558 - protein, 118 aa, synthetic construct
QIQLVQSGPELKKPGETVKISCKASGYTFTNYGMNWVKQAPGKGLKWMAWINTYTGEPTYADDFKGRFAFSLETSASTASLQIINLKNEDTATYFCARIGDSSPSDYWGQGTTLTVSS

SEQ ID NO: 559 - protein, 107 aa, synthetic construct
SIVMTQTPKFLLVSAGDRVTITCKASQSVSNDVVWYQQKPGQSPKLLIYYASNRYTGVPDRFAGSGYGTDFSFTISTVQAEDLAVYFCQQDYTSPWTFGGGTKLEIR

SEQ ID NO: 560 - protein, 5 aa, synthetic construct
GGGGS

SEQ ID NO: 561 - protein, 116 aa, synthetic construct
EVQLVESGGGLVQPGKSLKLSCEASGFTFSGYGMHWVRQAPGRGLESVAYITSSSINIKYADAVKGRFTVSRDNAKNLLFLQMNILKSEDTAMYYCARFDWDKNYWGQGTMVTVSS

SEQ ID NO: 562 - protein, 107 aa, synthetic construct
DIQMTQSPSSLPASLGDRVTINCQASQDISNYLNWYQQKPGKAPKLLIYYTNKLADGVPSRFSGSGSGRDSSFTISSLESEDIGSYYCQQYYNYPWTFGPGTKLEIK

SEQ ID NO: 563 - protein, 117 aa, synthetic construct
QVQLQQSGAELAKPGASVKMSCKASGYTFTRYWIHWIKQRPGQGLEWIGYINPTTVYTEFNQNFKDKATLTADKSSTTASMQLSSLTSEDSAVYYCARGGSNFFDYWGQGTTLTVSS

SEQ ID NO: 564 - protein, 107 aa, synthetic construct
DIQMTQSPASLAASVGETVAITCRASENIYYNLAWYQQKQGKSPQLLIYTANSLEDGVPSRFSGSGSGTQYSLKINSMQPEDSATYFCKQAYDVPPTFGGGTKLEIK

SEQ ID NO: 565 - protein, 118 aa, synthetic construct
QIQLVQSGPELKRPGETVKISCKASGYTFTNYGMNWVKQAPGKGLKWMGWINTYTGDPTYADDFKGRFAFSLETSASTAYLQINNLKNEDTATYFCARIGGNSPSDYWGQGTSLTVSS

SEQ ID NO: 566 - protein, 107 aa, synthetic construct
SIVMTQTPKFLLVSAGDRVTITCKASQSVSNDVAWYQQKPGQSPKLLIYYASNRYSGVPDRFTGSGYGTDFTFTISTVQAEDLAVYFCQQDYSSPWTFGGGTKLEIK
